(19) United States
(12) Patent Application Publication
(10) Pub. No.: US 2012/0270929 A1
(43) Pub. Date: Oct. 25, 2012

(54) MODULATION OF TTC39 EXPRESSION TO INCREASE HDL

(75) Inventors: Rosanne M. Crooke, Carlsbad, CA (US); Mark Graham, San Clemente, CA (US); Thomas A. Bell, Encinitas, CA (US)

(73) Assignee: ISIS Pharmaceuticals, Inc., Carlsbad, CA (US)

(21) Appl. No.: 13/498,055

(22) PCT Filed: Sep. 24, 2010
(86) PCT No.: PCT/US10/50292

§ 371 Date: Jul. 6, 2012

Related U.S. Application Data
(60) Provisional application No. 61/246,068, filed on Sep. 25, 2009.
(60) Provisional application No. 61/246,474, filed on Sep. 28, 2009.
(60) Provisional application No. 61/334,745, filed on May 14, 2010.

(51) Int. Cl. A61K 31/7088; A61P 1/16; A61P 3/10; A61P 3/06; A61P 9/12; A61P 9/00

(52) U.S. Cl. 514/44 R

(57) ABSTRACT

Provided herein are methods, compounds, and compositions for reducing expression of a TTC39 mRNA and protein in an animal. Also provided herein are methods, compounds, and compositions for increasing HDL and/or decreasing PCSK9 in an animal. Such methods, compounds, and compositions are useful to treat, prevent, delay, or ameliorate cardiovascular disease, or a symptom thereof.

### SEQUENCE LISTING

[0001] The present application is being filed along with a Sequence Listing in electronic format. The Sequence Listing is provided as a file entitled BIOL0115WOSEQ.txt created Sep. 24, 2010, which is approximately 568 Kb in size. The information in the electronic format of the sequence listing is incorporated herein by reference in its entirety.

### FIELD OF THE INVENTION

[0002] Provided herein are methods, compounds, and compositions for reducing expression of tetratricopeptide repeat domain 39 (TTC39) mRNA and protein in an animal. Also, provided herein are methods, compounds, and compositions comprising a TTC39 inhibitor for increasing HDL levels in an animal. Such methods, compounds, and compositions are useful, for example, to treat, prevent, or ameliorate cardiovascular disease in an animal.

### BACKGROUND

[0003] TTC39 proteins are members of the TPR (tetratricopeptide repeat) protein family. There are 3 known human isoforms of the protein: TTC39A, TTC39B and TTC39C. The TTC39 proteins have at least one TPR motif consisting of two antiparallel α-helices and tandem arrays of TPR motifs create a grooved domain capable of facilitating a wide array of protein-protein interactions (Blatch G L, Lassie M. The tetratricopeptide repeat: a structural motif mediating protein-protein interactions. BioEssays 1999; 21:932-939). Experimental evidence has shown that TPR proteins are involved in four major types of complexes: 1) molecular chaperone, 2) anaphase promotional, 3) transcriptional repression, and 4) protein transport complexes (Blatch G L, Lassie M. The tetratricopeptide repeat: a structural motif mediating protein-protein interactions. BioEssays 1999; 21:932-939; Smith D F. Tetratricopeptide repeat cochaperones in steroid receptor complexes. Cell Stress and Chaperones 2004; 9(2):109-121).

[0004] Recently during a Genome-Wide Association Study (GWAS) the TPR protein, TTC39B, was implicated as having an association with cardiovascular disease (Kathiresan S. et al. Common variants at 30 loci contribute to polygenic dyslipidemia. Nature Genetics 2009; 41(1):56-65). TTC39B expression was negatively associated with plasma high density lipoprotein (HDL) cholesterol levels and an allele associated with lower TTC39B transcript levels was also associated with higher HDL cholesterol levels. Cellular cholesterol efflux is mediated by HDL. Low levels of HDL cholesterol can be a significant predictor of atherosclerotic cardiovascular events. Plasma levels of HDL are inversely correlated with the risk of cardiovascular disease (Caveliar et al, Biochim Biophys Acta. 2006 1761: 655-66).

[0005] GWAS has implicated a number of genes in cardiovascular disease or associated genes with markers (such as cholesterol levels) for cardiovascular disease. Although TTC39B has been implicated by GWAS in cardiovascular disease, more study is required to determine the nature of the association and whether modulation of a gene product has therapeutic relevance.

[0006] The function of the TTC39 proteins has not yet been fully elucidated.

### SUMMARY OF THE INVENTION

[0007] Provided herein are methods, compounds, and compositions for inhibiting expression of TTC39 and treating, preventing, delaying or ameliorating a TTC39 related disease and/or a symptom thereof.

[0008] Certain embodiments provide a method of reducing a TTC39 isoform expression in an animal comprising administering to the animal a compound comprising a modified oligonucleotide 12 to 30 linked nucleosides in length targeted to the TTC39 isoform.

[0009] Certain embodiments provide a method of increasing HDL level in an animal comprising administering to the animal a compound comprising a modified oligonucleotide 12 to 30 linked nucleosides in length targeted to a TTC39 isoform, wherein the modified oligonucleotide reduces the TTC39 isoform expression in the animal, thereby increasing the HDL level in the animal.

[0010] Certain embodiments provide a method for treating an animal with cardiovascular disease comprising: a) identifying said animal with cardiovascular disease, and b) administering to said animal a therapeutically effective amount of a compound comprising a modified oligonucleotide 12 to 30 linked nucleosides in length targeted to a TTC39 isoform.

[0011] In certain embodiments, the TTC39 isoform is TTC39B with a sequence as set forth in GenBank Accession No. NM_{—}152574.1 (incorporated herein as SEQ ID NO: 1)

[0012] In certain embodiments, inhibition of TTC39B expression increases HDL in an animal.

### DETAILED DESCRIPTION OF THE INVENTION

[0013] It is to be understood that both the foregoing general description and the following detailed description are exemplary and explanatory only and are not restrictive of the invention, as claimed. Herein, the use of the singular includes the plural unless specifically stated otherwise. As used herein, the use of “or” means “and/or” unless stated otherwise. Furthermore, the use of the term “including” as well as other forms, such as “includes” and “included”, is not limiting. Also, terms such as “element” or “component” encompass both elements and components comprising one unit and elements and components that comprise more than one subunit, unless specifically stated otherwise.

[0014] The section headings used herein are for organizational purposes only and are not to be construed as limiting the subject matter described. All documents, or portions of documents, cited in this application, including, but not limited to, patents, patent applications, articles, books, and treatises, are hereby expressly incorporated-by-reference for the portions of the document discussed herein, as well as in their entirety.

### DEFINITIONS

[0015] Unless specific definitions are provided, the nomenclature utilized in connection with, and the procedures and techniques of, analytical chemistry, synthetic organic chemistry, and medicinal and pharmaceutical chemistry described herein are those well known and commonly used in the art. Standard techniques can be used for chemical synthesis, and chemical analysis. Where permitted, all patents, applications, published applications and other publications, GENBANK Accession Numbers and associated sequence information obtainable through databases such as National Center for Biotechnology Information (NCBI) and other data referred to throughout in the disclosure herein are incorporated by reference for the portions of the document discussed herein, as well as in their entirety.

[0016] Unless otherwise indicated, the following terms have the following meanings:

[0017] “2′-O-methoxyethyl” (also 2′-MOE and 2′-O(CH₂)₂—OCH₃) refers to an O-methoxy-ethyl modification of the 2′ position of a furosyl ring. A 2′-O-methoxyethyl modified sugar is a modified sugar.

[0018] “2′-O-methoxyethyl nucleotide” means a nucleotide comprising a 2′-O-methoxyethyl modified sugar moiety.

[0019] “5-methylcytosine” means a cytosine modified with a methyl group attached to the 5′ position. A 5-methylcytosine is a modified nucleobase.

[0020] “Active pharmaceutical agent” means the substance or substances in a pharmaceutical composition that provide a therapeutic benefit when administered to an individual. For example, in certain embodiments an antisense oligonucleotide targeted to TTC39B is an active pharmaceutical agent.

[0021] “Active target region” or “target region” means a region to which one or more active antisense compounds is targeted. “Active antisense compounds” means antisense compounds that reduce target nucleic acid levels or protein levels.

[0022] “Administered concomitantly” refers to the co-administration of two agents in any manner in which the pharmacological effects of both are manifest in the patient at the same time. Concomitant administration does not require that both agents be administered in a single pharmaceutical composition, in the same dosage form, or by the same route of administration. The effects of both agents need not manifest themselves at the same time. The effects need only be overlapping for a period of time and need not be coextensive.

[0023] “Administering” means providing an agent to an animal, and includes, but is not limited to, administering by a medical professional and self-administering.

[0024] “Agent” means an active substance that can provide a therapeutic benefit when administered to an animal. “First Agent” means a therapeutic compound of the invention. For example, a first agent can be an antisense oligonucleotide targeting TTC39B. “Second agent” means a second therapeutic compound of the invention (e.g. a second antisense oligonucleotide targeting TTC39B) and/or a non-TTC39 therapeutic compound (e.g., statins, ezetamibe, niacin, fibrates, beta blockers, antithrombotics and antihypertensives).

[0025] “Amelioration” refers to a lessening of at least one indicator, sign, or symptom of an associated disease, disorder, or condition. The severity of indicators can be determined by subjective or objective measures, which are known to those skilled in the art.

[0026] “Animal” refers to a human or non-human animal, including, but not limited to, mice, rats, rabbits, dogs, cats, pigs, and non-human primates, including, but not limited to, monkeys and chimpanzees.

[0027] “Antisense activity” means any detectable or measurable activity attributable to the hybridization of an antisense compound to its target nucleic acid. In certain embodiments, antisense activity is a decrease in the amount or expression of a target nucleic acid or protein encoded by such target nucleic acid.

[0028] “Antisense compound” means an oligomeric compound that is capable of undergoing hybridization to a target nucleic acid through hydrogen bonding.

[0029] “Antisense inhibition” means reduction of target nucleic acid levels or target protein levels in the presence of an antisense compound complementary to a target nucleic acid compared to target nucleic acid levels or target protein levels in the absence of the antisense compound.

[0030] “Antisense oligonucleotide” means a single-stranded oligonucleotide having a nucleobase sequence that permits hybridization to a corresponding region or segment of a target nucleic acid.

[0031] “Bicyclic sugar” means a furosyl ring modified by the bridging of two non-geminal ring atoms. A bicyclic sugar is a modified sugar.

[0032] “Bicyclic nucleic acid” or “BNA” refers to a nucleoside or nucleotide wherein the furanose portion of the nucleoside or nucleotide includes a bridge connecting two carbon atoms on the furanose ring, thereby forming a bicyclic ring system.

[0033] “Cap structure” or “terminal cap moiety” means chemical modifications, which have been incorporated at either terminus of an antisense compound.

[0034] “Cardiovascular Disease” means a disease or condition affecting the heart or blood vessel of an animal. Examples of cardiovascular disease include, but are not limited to, arteriosclerosis, atherosclerosis, coronary heart disease, heart failure, hypertension, dyslipidemia, hypercholesterolemia, acute coronary syndrome, type II diabetes, type II diabetes with dyslipidemia, hepatic steatosis, non-alcoholic steatohepatitis, non-alcoholic fatty liver disease, hypertriglyceridemia, hyperfattyacidemia, hyperlipidemia and metabolic syndrome.

[0035] “Chemically distinct region” refers to a region of an antisense compound that is in some way chemically different than another region of the same antisense compound. For example, a region having 2′-O-methoxyethyl nucleotides is chemically distinct from a region having nucleotides without 2′-O-methoxyethyl modifications.

[0036] “Chimeric antisense compound” means an antisense compound that has at least two chemically distinct regions.

[0037] “Co-administration” means administration of two or more agents to an individual. The two or more agents can be in a single pharmaceutical composition, or can be in separate pharmaceutical compositions. Each of the two or more agents can be administered through the same or different routes of administration. Co-administration encompasses parallel or sequential administration.

[0038] “Complementarity” means the capacity for pairing between nucleobases of a first nucleic acid and a second nucleic acid.

[0039] “Contiguous nucleobases” means nucleobases immediately adjacent to each other.

[0040] “Diluent” means an ingredient in a composition that lacks pharmacological activity, but is pharmaceutically necessary or desirable. For example, the diluent in an injected composition can be a liquid, e.g. saline solution.

[0041] “Dose” means a specified quantity of a pharmaceutical agent provided in a single administration, or in a specified time period. In certain embodiments, a dose can be administered in one, two, or more boluses, tablets, or injections. For example, in certain embodiments where subcutaneous administration is desired, the desired dose requires a volume not easily accommodated by a single injection, therefore, two or more injections can be used to achieve the desired dose. In certain embodiments, the pharmaceutical agent is administered by infusion over an extended period of time or continuously. Doses can be stated as the amount of pharmaceutical agent per hour, day, week, or month.

[0042] “Effective amount” or “therapeutically effective amount” means the amount of active pharmaceutical agent sufficient to effectuate a desired physiological outcome in an individual in need of the agent. The effective amount can vary among individuals depending on the health and physical condition of the individual to be treated, the taxonomic group of the individuals to be treated, the formulation of the composition, assessment of the individual's medical condition, and other relevant factors.

[0043] “Fully complementary” or “100% complementary” means each nucleobase of a nucleobase sequence of a first nucleic acid has a complementary nucleobase in a second nucleobase sequence of a second nucleic acid. In certain embodiments, a first nucleic acid is an antisense compound and a target nucleic acid is a second nucleic acid.

[0044] “Gapmer” means a chimeric antisense compound in which an internal region having a plurality of nucleosides that support RNase H cleavage is positioned between external regions having one or more nucleosides, wherein the nucleosides comprising the internal region are chemically distinct from the nucleoside or nucleosides comprising the external regions. The internal region can be referred to as a “gap segment” and the external regions can be referred to as “wing segments.”

[0045] “Gap-widened” means a chimeric antisense compound having a gap segment of 12 or more contiguous 2′-deoxyribonucleosides positioned between and immediately adjacent to 5′ and 3′ wing segments having from one to six nucleosides.

[0046] “HDL” means high density lipoprotein particles. Concentration of HDL in serum (or plasma) is typically quantified in mg/dL or nmol/L. “Serum HDL” and “plasma HDL” mean HDL in the serum and plasma, respectively.

[0047] “Hybridization” means the annealing of complementary nucleic acid molecules. In certain embodiments, complementary nucleic acid molecules include an antisense compound and a target nucleic acid.

[0048] “Identifying an animal with cardiovascular disease” means identifying an animal having been diagnosed with a cardiovascular disease, disorder or condition or identifying an animal predisposed to develop a cardiovascular disease, disorder or condition. For example, individuals with a familial history of dyslipidemia or hyperlipidemia can be predisposed to cardiovascular disease, disorder or condition. Such identification can be accomplished by any method including evaluating an individual's medical history and standard clinical tests or assessments.

[0049] “Immediately adjacent” means there are no intervening elements between the immediately adjacent elements.

[0050] “Individual” means a human or non-human animal selected for treatment or therapy.

[0051] “Internucleoside linkage” refers to the chemical bond between nucleosides.

[0052] “Isoforms” means different genes with similar functional domains or sequence homology in some domains.

[0053] “Linked nucleosides” means adjacent nucleosides which are bonded together.

[0054] “Mismatch” or “non-complementary nucleobase” refers to the case when a nucleobase of a first nucleic acid is not capable of pairing with the corresponding nucleobase of a second or target nucleic acid.

[0055] “Modified internucleoside linkage” refers to a substitution or any change from a naturally occurring internucleoside bond (i.e. a phosphodiester internucleoside bond).

[0056] “Modified nucleobase” refers to any nucleobase other than adenine, cytosine, guanine, thymidine, or uracil. An “unmodified nucleobase” means the purine bases adenine (A) and guanine (G), and the pyrimidine bases thymine (T), cytosine (C), and uracil (U).

[0057] “Modified nucleotide” means a nucleotide having, independently, a modified sugar moiety, modified internucleoside linkage, or modified nucleobase. A “modified nucleoside” means a nucleoside having, independently, a modified sugar moiety or modified nucleobase.

[0058] “Modified oligonucleotide” means an oligonucleotide comprising at least one modified nucleotide.

[0059] “Modified sugar” refers to a substitution or change from a natural sugar.

[0060] “Motif” means the pattern of chemically distinct regions in an antisense compound.

[0061] “Naturally occurring internucleoside linkage” means a 3′ to 5′ phosphodiester linkage.

[0062] “Natural sugar moiety” means a sugar found in DNA (2′-H) or RNA (2′-OH).

[0063] “Nucleic acid” refers to molecules composed of monomeric nucleotides. A nucleic acid includes ribonucleic acids (RNA), deoxyribonucleic acids (DNA), single-stranded nucleic acids, double-stranded nucleic acids, small interfering ribonucleic acids (siRNA), and microRNAs (miRNA). A nucleic acid can also comprise a combination of these elements in a single molecule.

[0064] “Nucleobase” means a heterocyclic moiety capable of pairing with a base of another nucleic acid.

[0065] “Nucleobase sequence” means the order of contiguous nucleobases independent of any sugar, linkage, or nucleobase modification.

[0066] “Nucleoside” means a nucleobase linked to a sugar.

[0067] “Nucleotide” means a nucleoside having a phosphate group covalently linked to the sugar portion of the nucleoside.

[0068] “Oligomeric compound” or “oligomer” means a polymer of linked monomeric subunits which is capable of hybridizing to at least a region of a nucleic acid molecule.

[0069] “Oligonucleotide” means a polymer of linked nucleosides each of which can be modified or unmodified, independent one from another.

[0070] “Parenteral administration” means administration through injection or infusion. Parenteral administration includes subcutaneous administration, intravenous administration, intramuscular administration, intraarterial administration, intraperitoneal administration, or intracranial administration, e.g. intrathecal or intracerebroventricular administration. Administration can be continuous, or chronic, or short or intermittent.

[0071] “PCSK9” (also known as “proprotein convertase subtilisin/kexin type 9”) is an enzyme which plays a major regulatory role in cholesterol homeostasis. PCSK9 binds to low-density lipoprotein receptors (LDLR), inducing LDLR degradation. Reduced LDLR levels result in decreased metabolism of low-density lipoproteins, which could lead to cardiovascular disease.

[0072] “Peptide” means a molecule formed by linking at least two amino acids by amide bonds. Peptide refers to polypeptides and proteins.

[0073] “Pharmaceutical composition” means a mixture of substances suitable for administering to an individual. For example, a pharmaceutical composition can comprise one or more active agents and a sterile aqueous solution.

[0074] “Pharmaceutically acceptable salts” means physiologically and pharmaceutically acceptable salts of antisense compounds, i.e., salts that retain the desired biological activity of the parent oligonucleotide and do not impart undesired toxicological effects thereto.

[0075] “Phosphorothioate linkage” means a linkage between nucleosides where the phosphodiester bond is modified by replacing one of the non-bridging oxygen atoms with a sulfur atom. A phosphorothioate linkage is a modified internucleoside linkage.

[0076] “Portion” means a defined number of contiguous (i.e. linked) nucleobases of a nucleic acid. In certain embodiments, a portion is a defined number of contiguous nucleobases of a target nucleic acid. In certain embodiments, a portion is a defined number of contiguous nucleobases of an antisense compound.

[0077] “Prevent” refers to delaying or forestalling the onset or development of a disease, disorder, or condition for a period of time from minutes to indefinitely. Prevent also means reducing risk of developing a disease, disorder, or condition.

[0078] “Prodrug” means a therapeutic agent that is prepared in an inactive form that is converted to an active form within the body or cells thereof by the action of endogenous enzymes or other chemicals or conditions.

[0079] “Side effects” means physiological responses attributable to a treatment other than the desired effects. In certain embodiments, side effects include injection site reactions, liver function test abnormalities, renal function abnormalities, liver toxicity, renal toxicity, central nervous system abnormalities, myopathies, and malaise. For example, increased aminotransferase levels in serum can indicate liver toxicity or liver function abnormality. For example, increased bilirubin can indicate liver toxicity or liver function abnormality.

[0080] “Single-stranded oligonucleotide” means an oligonucleotide which is not hybridized to a complementary strand.

[0081] “Specifically hybridizable” refers to an antisense compound having a sufficient degree of complementarity between an antisense oligonucleotide and a target nucleic acid to induce a desired effect, while exhibiting minimal or no effects on non-target nucleic acids under conditions in which specific binding is desired, i.e. under physiological conditions in the case of in vivo assays and therapeutic treatments.

[0082] “Targeting” or “targeted” means the process of design and selection of an antisense compound that will specifically hybridize to a target nucleic acid and induce a desired effect.

[0083] “Target nucleic acid,” “target RNA,” and “target RNA transcript” all refer to a nucleic acid capable of being targeted by antisense compounds.

[0084] “Target segment” means the sequence of nucleotides of a target nucleic acid to which an antisense compound is targeted. “5′ target site” refers to the 5′-most nucleotide of a target segment. “3′ target site” refers to the 3′-most nucleotide of a target segment.

[0085] “Therapeutically effective amount” means an amount of an agent that provides a therapeutic benefit to an individual.

[0086] “Treat” refers to administering a pharmaceutical composition to effect an alteration or improvement of a disease, disorder, or condition.

[0087] “TTC39” means any of the isoforms TTC39A, TTC39B or TTC39C. TTC39 can mean a nucleic acid or protein of any of the isoforms.

[0088] “TTC39 expression” means the level of mRNA transcribed from the gene encoding TTC39 or the level of protein translated from the mRNA. TTC39 expression can be determined by art known methods such as a Northern or Western blot.

[0089] “TTC39 nucleic acid” means any nucleic acid encoding a tetratricopeptide repeat domain 39 (“TTC39”) isoform. For example, in certain embodiments, a TTC39 nucleic acid includes a DNA sequence encoding TTC39, an RNA sequence transcribed from DNA encoding TTC39 (including genomic DNA comprising introns and exons), and an mRNA sequence encoding TTC39. “TTC39 mRNA” means an mRNA encoding a TTC39 protein. “TTC39A mRNA” means an mRNA encoding a TTC39A protein. “TTC39B mRNA” means an mRNA encoding a TTC39B protein. “TTC39C mRNA” means an mRNA encoding a TTC39C protein.

[0090] “Unmodified nucleotide” means a nucleotide composed of naturally occurring nucleobases, sugar moieties, and internucleoside linkages. In certain embodiments, an unmodified nucleotide is an RNA nucleotide (i.e. β-D-ribonucleosides) or a DNA nucleotide (i.e. 13-D-deoxyribonucleoside).

### Certain Embodiments

[0091] Certain embodiments provide methods, compounds, and compositions for inhibiting TTC39 expression.

[0092] Certain embodiments provide a method of reducing a TTC39 isoform expression in an animal comprising administering to the animal a compound comprising a modified oligonucleotide targeted to the TTC39 isoform. In certain embodiments, the modified oligonucleotide is 12 to 30 linked nucleosides in length.

[0093] Certain embodiments provide a method of increasing HDL level in an animal comprising administering to the animal a compound comprising a modified oligonucleotide targeted to a TTC39 isoform, wherein the modified oligonucleotide reduces the TTC39 isoform expression in the animal, thereby increasing the HDL level in the animal. In certain embodiments, the modified oligonucleotide is 12 to 30 linked nucleosides in length

[0094] Certain embodiments provide a method of decreasing PCSK9 level in an animal comprising administering to the animal a compound comprising a modified oligonucleotide targeted to a TTC39 isoform, wherein the modified oligonucleotide reduces the TTC39 isoform expression in the animal, thereby reducing the PCSK9 level in the animal. In certain embodiments, the modified oligonucleotide is 12 to 30 linked nucleosides in length.

[0095] Certain embodiments provide a method of increasing apoA1 level in an animal comprising administering to the animal a compound comprising a modified oligonucleotide targeted to a TTC39 isoform, wherein the modified oligonucleotide reduces the TTC39 isoform expression in the animal, thereby increasing the apoA1 level in the animal. In certain embodiments, the modified oligonucleotide is 12 to 30 linked nucleosides in length.

[0096] Certain embodiments provide a method of increasing apoA4 level in an animal comprising administering to the animal a compound comprising a modified oligonucleotide targeted to a TTC39 isoform, wherein the modified oligonucleotide reduces the TTC39 isoform expression in the animal, thereby increasing the apoA4 level in the animal. In certain embodiments, the modified oligonucleotide is 12 to 30 linked nucleosides in length.

[0097] Certain embodiments provide a method of increasing LDL receptor level in an animal comprising administering to the animal a compound comprising a modified oligonucleotide targeted to a TTC39 isoform, wherein the modified oligonucleotide reduces the TTC39 isoform expression in the animal, thereby increasing the LDL receptor level in the animal. In certain embodiments, the modified oligonucleotide is 12 to 30 linked nucleosides in length.

[0098] Certain embodiments provide a method for treating an animal with cardiovascular disease comprising: a) identifying said animal with cardiovascular disease, and b) administering to said animal a therapeutically effective amount of a compound comprising a modified oligonucleotide targeted to a TTC39 isoform. In certain embodiments, the therapeutically effective amount of the compound administered to the animal increases HDL in the animal. In certain embodiments, the modified oligonucleotide is 12 to 30 linked nucleosides in length.

[0099] In certain embodiments, the TTC39 isoform is isoform A, B or C. In certain embodiments, the TTC39A isoform has the sequence as set forth in GenBank Accession No. NM_{—}001144832.1 (incorporated herein as SEQ ID NO: 2). In certain embodiments, the TTC39β isoform has the sequence as set forth in GenBank Accession No. NM_{—}152574.1 (incorporated herein as SEQ ID NO: 1). In certain embodiments, the TTC39C isoform has the sequence as set forth in GenBank Accession No. NM_{—}153211.3 (incorporated herein as SEQ ID NO: 3).

[0100] Certain embodiments provide a method of reducing TTC39B expression comprising administering to an animal a compound comprising a modified oligonucleotide consisting of 12 to 30 linked nucleosides and having a nucleobase sequence at least 90% complementary to SEQ ID NO: 1 as measured over the entirety of said modified oligonucleotide. In certain embodiments, the reduction in TTC39B expression increases HDL, apoA1, apoA4 and/or LDL receptor levels in the animal. In certain embodiments, the reduction in TTC39B expression decreases PCSK9 levels in the animal.

[0101] Certain embodiments provide a method of increasing HDL in an animal comprising administering to the animal a compound comprising a modified oligonucleotide which reduces expression of TTC39B, wherein the modified oligonucleotide consists of 12 to 30 linked nucleosides having a nucleobase sequence at least 90% complementary to SEQ ID NO: 1 as measured over the entirety of said modified oligonucleotide, and wherein said reduction of TTC39B increases HDL in the animal.

[0102] Certain embodiments provide a method of decreasing PCSK9 in an animal comprising administering to the animal a compound comprising a modified oligonucleotide which reduces expression of TTC39B, wherein the modified oligonucleotide consists of 12 to 30 linked nucleosides having a nucleobase sequence at least 90% complementary to SEQ ID NO: 1 as measured over the entirety of said modified oligonucleotide, and wherein said reduction of TTC39B decreases PCSK9 in the animal.

[0103] Certain embodiments provide a method of increasing apoA1 in an animal comprising administering to the animal a compound comprising a modified oligonucleotide which reduces expression of TTC39B, wherein the modified oligonucleotide consists of 12 to 30 linked nucleosides having a nucleobase sequence at least 90% complementary to SEQ ID NO: 1 as measured over the entirety of said modified oligonucleotide, and wherein said reduction of TTC39B increases apoA1 in the animal.

[0104] Certain embodiments provide a method of increasing apoA4 in an animal comprising administering to the animal a compound comprising a modified oligonucleotide which reduces expression of TTC39B, wherein the modified oligonucleotide consists of 12 to 30 linked nucleosides having a nucleobase sequence at least 90% complementary to SEQ ID NO: 1 as measured over the entirety of said modified oligonucleotide, and wherein said reduction of TTC39B increases apoA4 in the animal.

[0105] Certain embodiments provide a method of increasing LDL receptor in an animal comprising administering to the animal a compound comprising a modified oligonucleotide which reduces expression of TTC39B, wherein the modified oligonucleotide consists of 12 to 30 linked nucleosides having a nucleobase sequence at least 90% complementary to SEQ ID NO: 1 as measured over the entirety of said modified oligonucleotide, and wherein said reduction of TTC39B increases LDL receptor in the animal.

[0106] Certain embodiments provide a method for treating an animal with cardiovascular disease comprising: a) identifying said animal with cardiovascular disease, and b) administering to said animal a therapeutically effective amount of a compound comprising a modified oligonucleotide consisting of 12 to 30 linked nucleosides and having a nucleobase sequence at least 90% complementary to SEQ ID NO: 1 as measured over the entirety of said modified oligonucleotide. In certain embodiments, the therapeutically effective amount of the compound administered to the animal increases HDL, apoA1, apoA4 and/or LDL receptor in the animal. In certain embodiments, the therapeutically effective amount of the compound administered to the animal decreases PCSK9 in the animal.

[0107] In certain embodiments, the modified oligonucleotide has a nucleobase sequence comprising at least 8 contiguous nucleobases of the nucleobase sequence recited in SEQ ID NO: 1, 2 or 3.

[0108] In certain embodiments, the animal is a human.

[0109] In certain embodiments, the compounds or compositions of the invention are designated as a first agent and the methods of the invention further comprise administering a second agent. In certain embodiments, the first agent and the second agent are co-administered. In certain embodiments the first agent and the second agent are co-administered sequentially or concomitantly.

[0110] In certain embodiments, administration comprises parenteral administration.

[0111] In certain embodiments, the compound of the invention consists of a single-stranded modified oligonucleotide. In certain embodiments, the nucleobase sequence of the modified oligonucleotide is at least 95% complementary to SEQ ID NO: 1, 2 or 3 as measured over the entirety of said modified oligonucleotide. In certain embodiments, the nucleobase sequence of the modified oligonucleotide is at least 100% complementary to SEQ ID NO: 1, 2 or 3 as measured over the entirety of said modified oligonucleotide.

[0112] In certain embodiments, at least one internucleoside linkage of said modified oligonucleotide is a modified internucleoside linkage. In certain embodiments, each internucleoside linkage is a phosphorothioate internucleoside linkage.

[0113] In certain embodiments, at least one nucleoside of said modified oligonucleotide comprises a modified sugar. In certain embodiments, at least one modified sugar is a bicyclic sugar. In certain embodiments, at least one modified sugar comprises a 2′-O-methoxyethyl or a 4′-(CH₂)ₙ—O-2′ bridge, wherein n is 1 or 2.

[0114] In certain embodiments, at least one nucleoside of said modified oligonucleotide comprises a modified nucleobase. In certain embodiments, the modified nucleobase is a 5-methylcytosine.

[0115] In certain embodiments, the modified oligonucleotide comprises: a) a gap segment consisting of linked deoxynucleosides; b) a 5′ wing segment consisting of linked nucleosides; and c) a 3′ wing segment consisting of linked nucleosides. The gap segment is positioned between the 5′ wing segment and the 3′ wing segment and each nucleoside of each wing segment comprises a modified sugar.

[0116] In certain embodiments, the modified oligonucleotide comprises: a) a gap segment consisting of ten linked deoxynucleosides; b) a 5′ wing segment consisting of five linked nucleosides; and c) a 3′ wing segment consisting of five linked nucleosides. The gap segment is positioned between the 5′ wing segment and the 3′ wing segment, each nucleoside of each wing segment comprises a 2′-O-methoxyethyl sugar, each internucleoside linkage of said modified oligonucleotide is a phosphorothioate linkage, and each cytosine in said modified oligonucleotide is a 5′-methylcytosine.

[0117] In certain embodiments, the modified oligonucleotide consists of 20 linked nucleosides.

[0118] Certain embodiments provide a method of reducing TTC39A in an animal comprising administering to the animal a modified oligonucleotide which reduces expression of TTC39A, wherein the modified oligonucleotide comprises: a) a gap segment consisting of ten linked deoxynucleosides; b) a 5′ wing segment consisting of five linked nucleosides; and c) a 3′ wing segment consisting of five linked nucleosides. The gap segment is positioned between the 5′ wing segment and the 3′ wing segment, each nucleoside of each wing segment comprises a 2′-O-methoxyethyl sugar, each internucleoside linkage of said modified oligonucleotide is a phosphorothioate linkage, each cytosine in said modified oligonucleotide is a 5′-methylcytosine.

[0119] Certain embodiments provide a method of increasing HDL in an animal comprising administering to the animal a compound comprising a modified oligonucleotide which reduces expression of TTC39A, wherein the modified oligonucleotide comprises: a) a gap segment consisting of ten linked deoxynucleosides; b) a 5′ wing segment consisting of five linked nucleosides; and c) a 3′ wing segment consisting of five linked nucleosides. The gap segment is positioned between the 5′ wing segment and the 3′ wing segment, each nucleoside of each wing segment comprises a 2′-O-methoxyethyl sugar, each internucleoside linkage of said modified oligonucleotide is a phosphorothioate linkage, each cytosine in said modified oligonucleotide is a 5′-methylcytosine and said reduction of TTC39A expression increases HDL in the animal.

[0120] Certain embodiments provide a method of reducing PCSK9 in an animal comprising administering to the animal a compound comprising a modified oligonucleotide which reduces expression of TTC39A, wherein the modified oligonucleotide comprises: a) a gap segment consisting of ten linked deoxynucleosides; b) a 5′ wing segment consisting of five linked nucleosides; and c) a 3′ wing segment consisting of five linked nucleosides. The gap segment is positioned between the 5′ wing segment and the 3′ wing segment, each nucleoside of each wing segment comprises a 2′-O-methoxyethyl sugar, each internucleoside linkage of said modified oligonucleotide is a phosphorothioate linkage, each cytosine in said modified oligonucleotide is a 5′-methylcytosine and reduction of TTC39A expression reduces PCSK9 in the animal.

[0121] Certain embodiments provide a method of increasing apoA1 in an animal comprising administering to the animal a compound comprising a modified oligonucleotide which reduces expression of TTC39A, wherein the modified oligonucleotide comprises: a) a gap segment consisting of ten linked deoxynucleosides; b) a 5′ wing segment consisting of five linked nucleosides; and c) a 3′ wing segment consisting of five linked nucleosides. The gap segment is positioned between the 5′ wing segment and the 3′ wing segment, each nucleoside of each wing segment comprises a 2′-O-methoxyethyl sugar, each internucleoside linkage of said modified oligonucleotide is a phosphorothioate linkage, each cytosine in said modified oligonucleotide is a 5′-methylcytosine and said reduction of TTC39A expression increases apoA1 in the animal.

[0122] Certain embodiments provide a method of increasing apoA4 in an animal comprising administering to the animal a compound comprising a modified oligonucleotide which reduces expression of TTC39A, wherein the modified oligonucleotide comprises: a) a gap segment consisting of ten linked deoxynucleosides; b) a 5′ wing segment consisting of five linked nucleosides; and c) a 3′ wing segment consisting of five linked nucleosides. The gap segment is positioned between the 5′ wing segment and the 3′ wing segment, each nucleoside of each wing segment comprises a 2′-O-methoxyethyl sugar, each internucleoside linkage of said modified oligonucleotide is a phosphorothioate linkage, each cytosine in said modified oligonucleotide is a 5′-methylcytosine and said reduction of TTC39A expression increases apoA4 in the animal.

[0123] Certain embodiments provide a method of increasing LDL receptor in an animal comprising administering to the animal a compound comprising a modified oligonucleotide which reduces expression of TTC39A, wherein the modified oligonucleotide comprises: a) a gap segment consisting of ten linked deoxynucleosides; b) a 5′ wing segment consisting of five linked nucleosides; and c) a 3′ wing segment consisting of five linked nucleosides. The gap segment is positioned between the 5′ wing segment and the 3′ wing segment, each nucleoside of each wing segment comprises a 2′-O-methoxyethyl sugar, each internucleoside linkage of said modified oligonucleotide is a phosphorothioate linkage, each cytosine in said modified oligonucleotide is a 5′-methylcytosine and said reduction of TTC39A expression increases LDL receptor in the animal.

[0124] Certain embodiments provide a method of treating cardiovascular disease in an animal comprising administering to the animal a compound comprising a modified oligonucleotide which reduces expression of TTC39A, wherein the modified oligonucleotide comprises: a) a gap segment consisting of ten linked deoxynucleosides; b) a 5′ wing segment consisting of five linked nucleosides; and c) a 3′ wing segment consisting of five linked nucleosides. The gap segment is positioned between the 5′ wing segment and the 3′ wing segment, each nucleoside of each wing segment comprises a 2′-O-methoxyethyl sugar, each internucleoside linkage of said modified oligonucleotide is a phosphorothioate linkage, each cytosine in said modified oligonucleotide is a 5′-methylcytosine and reduction of TTC39A expression treats cardiovascular disease in the animal.

[0125] Certain embodiments provide a method of reducing TTC39B in an animal comprising administering to the animal a modified oligonucleotide which reduces expression of TTC39B, wherein the modified oligonucleotide comprises: a) a gap segment consisting of ten linked deoxynucleosides; b) a 5′ wing segment consisting of five linked nucleosides; and c) a 3′ wing segment consisting of five linked nucleosides. The gap segment is positioned between the 5′ wing segment and the 3′ wing segment, each nucleoside of each wing segment comprises a 2′-O-methoxyethyl sugar, each internucleoside linkage of said modified oligonucleotide is a phosphorothioate linkage, each cytosine in said modified oligonucleotide is a 5′-methylcytosine.

[0126] Certain embodiments provide a method of increasing HDL in an animal comprising administering to the animal a compound comprising a modified oligonucleotide which reduces expression of TTC39B, wherein the modified oligonucleotide comprises: a) a gap segment consisting of ten linked deoxynucleosides; b) a 5′ wing segment consisting of five linked nucleosides; and c) a 3′ wing segment consisting of five linked nucleosides. The gap segment is positioned between the 5′ wing segment and the 3′ wing segment, each nucleoside of each wing segment comprises a 2′-O-methoxyethyl sugar, each internucleoside linkage of said modified oligonucleotide is a phosphorothioate linkage, each cytosine in said modified oligonucleotide is a 5′-methylcytosine and said reduction of TTC39B expression increases HDL in the animal.

[0127] Certain embodiments provide a method of reducing PCSK9 in an animal comprising administering to the animal a compound comprising a modified oligonucleotide which reduces expression of TTC39B, wherein the modified oligonucleotide comprises: a) a gap segment consisting of ten linked deoxynucleosides; b) a 5′ wing segment consisting of five linked nucleosides; and c) a 3′ wing segment consisting of five linked nucleosides. The gap segment is positioned between the 5′ wing segment and the 3′ wing segment, each nucleoside of each wing segment comprises a 2′-O-methoxyethyl sugar, each internucleoside linkage of said modified oligonucleotide is a phosphorothioate linkage, each cytosine in said modified oligonucleotide is a 5′-methylcytosine and reduction of TTC39B expression reduces PCSK9 in the animal.

[0128] Certain embodiments provide a method of increasing apoA1 in an animal comprising administering to the animal a compound comprising a modified oligonucleotide which reduces expression of TTC39B, wherein the modified oligonucleotide comprises: a) a gap segment consisting of ten linked deoxynucleosides; b) a 5′ wing segment consisting of five linked nucleosides; and c) a 3′ wing segment consisting of five linked nucleosides. The gap segment is positioned between the 5′ wing segment and the 3′ wing segment, each nucleoside of each wing segment comprises a 2′-O-methoxyethyl sugar, each internucleoside linkage of said modified oligonucleotide is a phosphorothioate linkage, each cytosine in said modified oligonucleotide is a 5′-methylcytosine and said reduction of TTC39B expression increases apoA1 in the animal.

[0129] Certain embodiments provide a method of increasing apoA4 in an animal comprising administering to the animal a compound comprising a modified oligonucleotide which reduces expression of TTC39B, wherein the modified oligonucleotide comprises: a) a gap segment consisting of ten linked deoxynucleosides; b) a 5′ wing segment consisting of five linked nucleosides; and c) a 3′ wing segment consisting of five linked nucleosides. The gap segment is positioned between the 5′ wing segment and the 3′ wing segment, each nucleoside of each wing segment comprises a 2′-O-methoxyethyl sugar, each internucleoside linkage of said modified oligonucleotide is a phosphorothioate linkage, each cytosine in said modified oligonucleotide is a 5′-methylcytosine and said reduction of TTC39B expression increases apoA4 in the animal.

[0130] Certain embodiments provide a method of increasing LDL receptor in an animal comprising administering to the animal a compound comprising a modified oligonucleotide which reduces expression of TTC39B, wherein the modified oligonucleotide comprises: a) a gap segment consisting of ten linked deoxynucleosides; b) a 5′ wing segment consisting of five linked nucleosides; and c) a 3′ wing segment consisting of five linked nucleosides. The gap segment is positioned between the 5′ wing segment and the 3′ wing segment, each nucleoside of each wing segment comprises a 2′-O-methoxyethyl sugar, each internucleoside linkage of said modified oligonucleotide is a phosphorothioate linkage, each cytosine in said modified oligonucleotide is a 5′-methylcytosine and said reduction of TTC39B expression increases LDL receptor in the animal.

[0131] Certain embodiments provide a method of treating cardiovascular disease in an animal comprising administering to the animal a compound comprising a modified oligonucleotide which reduces expression of TTC39B, wherein the modified oligonucleotide comprises: a) a gap segment consisting of ten linked deoxynucleosides; b) a 5′ wing segment consisting of five linked nucleosides; and c) a 3′ wing segment consisting of five linked nucleosides. The gap segment is positioned between the 5′ wing segment and the 3′ wing segment, each nucleoside of each wing segment comprises a 2′-O-methoxyethyl sugar, each internucleoside linkage of said modified oligonucleotide is a phosphorothioate linkage, each cytosine in said modified oligonucleotide is a 5′-methylcytosine and reduction of TTC39B expression treats cardiovascular disease in the animal.

[0132] Certain embodiments provide a method of reducing TTC39C in an animal comprising administering to the animal a modified oligonucleotide which reduces expression of TTC39C, wherein the modified oligonucleotide comprises: a) a gap segment consisting of ten linked deoxynucleosides; b) a 5′ wing segment consisting of five linked nucleosides; and c) a 3′ wing segment consisting of five linked nucleosides. The gap segment is positioned between the 5′ wing segment and the 3′ wing segment, each nucleoside of each wing segment comprises a 2′-O-methoxyethyl sugar, each internucleoside linkage of said modified oligonucleotide is a phosphorothioate linkage, each cytosine in said modified oligonucleotide is a 5′-methylcytosine.

[0133] Certain embodiments provide a method of increasing HDL in an animal comprising administering to the animal a compound comprising a modified oligonucleotide which reduces expression of TTC39C, wherein the modified oligonucleotide comprises: a) a gap segment consisting of ten linked deoxynucleosides; b) a 5′ wing segment consisting of five linked nucleosides; and c) a 3′ wing segment consisting of five linked nucleosides. The gap segment is positioned between the 5′ wing segment and the 3′ wing segment, each nucleoside of each wing segment comprises a 2′-O-methoxyethyl sugar, each internucleoside linkage of said modified oligonucleotide is a phosphorothioate linkage, each cytosine in said modified oligonucleotide is a 5′-methylcytosine and said reduction of TTC39C expression increases HDL in the animal.

[0134] Certain embodiments provide a method of reducing PCSK9 in an animal comprising administering to the animal a compound comprising a modified oligonucleotide which reduces expression of TTC39C, wherein the modified oligonucleotide comprises: a) a gap segment consisting of ten linked deoxynucleosides; b) a 5′ wing segment consisting of five linked nucleosides; and c) a 3′ wing segment consisting of five linked nucleosides. The gap segment is positioned between the 5′ wing segment and the 3′ wing segment, each nucleoside of each wing segment comprises a 2′-O-methoxyethyl sugar, each internucleoside linkage of said modified oligonucleotide is a phosphorothioate linkage, each cytosine in said modified oligonucleotide is a 5′-methylcytosine and reduction of TTC39C expression reduces PCSK9 in the animal.

[0135] Certain embodiments provide a method of increasing apoA1 in an animal comprising administering to the animal a compound comprising a modified oligonucleotide which reduces expression of TTC39C, wherein the modified oligonucleotide comprises: a) a gap segment consisting of ten linked deoxynucleosides; b) a 5′ wing segment consisting of five linked nucleosides; and c) a 3′ wing segment consisting of five linked nucleosides. The gap segment is positioned between the 5′ wing segment and the 3′ wing segment, each nucleoside of each wing segment comprises a 2′-O-methoxyethyl sugar, each internucleoside linkage of said modified oligonucleotide is a phosphorothioate linkage, each cytosine in said modified oligonucleotide is a 5′-methylcytosine and said reduction of TTC39C expression increases apoA1 in the animal.

[0136] Certain embodiments provide a method of increasing apoA4 in an animal comprising administering to the animal a compound comprising a modified oligonucleotide which reduces expression of TTC39C, wherein the modified oligonucleotide comprises: a) a gap segment consisting of ten linked deoxynucleosides; b) a 5′ wing segment consisting of five linked nucleosides; and c) a 3′ wing segment consisting of five linked nucleosides. The gap segment is positioned between the 5′ wing segment and the 3′ wing segment, each nucleoside of each wing segment comprises a 2′-O-methoxyethyl sugar, each internucleoside linkage of said modified oligonucleotide is a phosphorothioate linkage, each cytosine in said modified oligonucleotide is a 5′-methylcytosine and said reduction of TTC39C expression increases apoA4 in the animal.

[0137] Certain embodiments provide a method of increasing LDL receptor in an animal comprising administering to the animal a compound comprising a modified oligonucleotide which reduces expression of TTC39C, wherein the modified oligonucleotide comprises: a) a gap segment consisting of ten linked deoxynucleosides; b) a 5′ wing segment consisting of five linked nucleosides; and c) a 3′ wing segment consisting of five linked nucleosides. The gap segment is positioned between the 5′ wing segment and the 3′ wing segment, each nucleoside of each wing segment comprises a 2′-O-methoxyethyl sugar, each internucleoside linkage of said modified oligonucleotide is a phosphorothioate linkage, each cytosine in said modified oligonucleotide is a 5′-methylcytosine and said reduction of TTC39C expression increases LDL receptor in the animal.

[0138] Certain embodiments provide a method of treating cardiovascular disease in an animal comprising administering to the animal a compound comprising a modified oligonucleotide which reduces expression of TTC39C, wherein the modified oligonucleotide comprises: a) a gap segment consisting of ten linked deoxynucleosides; b) a 5′ wing segment consisting of five linked nucleosides; and c) a 3′ wing segment consisting of five linked nucleosides. The gap segment is positioned between the 5′ wing segment and the 3′ wing segment, each nucleoside of each wing segment comprises a 2′-O-methoxyethyl sugar, each internucleoside linkage of said modified oligonucleotide is a phosphorothioate linkage, each cytosine in said modified oligonucleotide is a 5′-methylcytosine and reduction of TTC39C expression treats cardiovascular disease in the animal.

[0139] In certain embodiments, cardiovascular disease can be, but is not limited to, arteriosclerosis, atherosclerosis, coronary heart disease, heart failure, hypertension, dyslipidemia, hypercholesterolemia, acute coronary syndrome, type II diabetes, type II diabetes with dyslipidemia, hepatic steatosis, non-alcoholic steatohepatitis, non-alcoholic fatty liver disease, hypertriglyceridemia, hyperfattyacidemia, hyperlipidemia and metabolic syndrome.

[0140] Certain embodiments of the invention provide the use of a compound targeted to TTC39A as described herein in the manufacture of a medicament for reducing TTC39A, increasing HDL, reducing PCSK9, increasing apoA1, increasing apoA4, increasing LDL receptor and/or for treating, ameliorating, or preventing cardiovascular disease.

[0141] Certain embodiments of the invention provide the use of a compound targeted to TTC39B as described herein in the manufacture of a medicament for reducing TTC39B, increasing HDL, reducing PCSK9, increasing apoA1, increasing apoA4, increasing LDL receptor and/or for treating, ameliorating, or preventing cardiovascular disease.

[0142] Certain embodiments of the invention provide the use of a compound targeted to TTC39C as described herein in the manufacture of a medicament for reducing TTC39C, increasing HDL, reducing PCSK9, increasing apoA1, increasing apoA4, increasing LDL receptor and/or for treating, ameliorating, or preventing cardiovascular disease.

[0143] Certain embodiments of the invention provide a kit for reducing TTC39A, increasing HDL, reducing PCSK9, increasing apoA1, increasing apoA4, increasing LDL receptor and/or for treating, preventing, or ameliorating cardiovascular disease as described herein wherein the kit comprises: a) a compound targeting TTC39A as described herein; and optionally b) an additional agent or therapy as described herein. The kit can further include instructions or a label for using the kit to treat, prevent, or ameliorate cardiovascular disease.

[0144] Certain embodiments of the invention provide a kit for reducing TTC39B, increasing HDL, reducing PCSK9, increasing apoA1, increasing apoA4, increasing LDL receptor and/or for treating, preventing, or ameliorating cardiovascular disease as described herein wherein the kit comprises: a) a compound targeting TTC39B as described herein; and optionally b) an additional agent or therapy as described herein. The kit can further include instructions or a label for using the kit to treat, prevent, or ameliorate cardiovascular disease.

[0145] Certain embodiments of the invention provide a kit for reducing TTC39C, increasing HDL, reducing PCSK9, increasing apoA1, increasing apoA4, increasing LDL receptor and/or for treating, preventing, or ameliorating cardiovascular disease as described herein wherein the kit comprises: a) a compound targeting TTC39C as described herein; and optionally b) an additional agent or therapy as described herein. The kit can further include instructions or a label for using the kit to treat, prevent, or ameliorate cardiovascular disease.

### Antisense Compounds

[0146] Oligomeric compounds include, but are not limited to, oligonucleotides, oligonucleosides, oligonucleotide analogs, oligonucleotide mimetics, antisense compounds, antisense oligonucleotides, and siRNAs. An oligomeric compound can be “antisense” to a target nucleic acid, meaning that is capable of undergoing hybridization to a target nucleic acid through hydrogen bonding.

[0147] In certain embodiments, an antisense compound has a nucleobase sequence that, when written in the 5′ to 3′ direction, comprises the reverse complement of the target segment of a target nucleic acid to which it is targeted. In certain such embodiments, an antisense oligonucleotide has a nucleobase sequence that, when written in the 5′ to 3′ direction, comprises the reverse complement of the target segment of a target nucleic acid to which it is targeted.

[0148] In certain embodiments, an antisense compound targeted to a TTC39 nucleic acid is 12 to 30 nucleotides in length. In other words, antisense compounds are from 12 to 30 linked nucleobases. In other embodiments, the antisense compound comprises a modified oligonucleotide consisting of 8 to 80, 12 to 50, 15 to 30, 18 to 24, 19 to 22, or 20 linked nucleobases. In certain such embodiments, the antisense compound comprises a modified oligonucleotide consisting of 8, 9, 10, 11, 12, 13, 14, 15, 16, 17, 18, 19, 20, 21, 22, 23, 24, 25, 26, 27, 28, 29, 30, 31, 32, 33, 34, 35, 36, 37, 38, 39, 40, 41, 42, 43, 44, 45, 46, 47, 48, 49, 50, 51, 52, 53, 54, 55, 56, 57, 58, 59, 60, 61, 62, 63, 64, 65, 66, 67, 68, 69, 70, 71, 72, 73, 74, 75, 76, 77, 78, 79, or 80 linked nucleobases in length, or a range defined by any two of the above values.

[0149] In certain embodiments, the antisense compound comprises a shortened or truncated modified oligonucleotide. The shortened or truncated modified oligonucleotide can have a single nucleoside deleted from the 5′ end (5′ truncation), or alternatively from the 3′ end (3′ truncation). A shortened or truncated oligonucleotide can have two nucleosides deleted from the 5′ end, or alternatively can have two subunits deleted from the 3′ end. Alternatively, the deleted nucleosides can be dispersed throughout the modified oligonucleotide, for example, in an antisense compound having one nucleoside deleted from the 5′ end and one nucleoside deleted from the 3′ end.

[0150] When a single additional nucleoside is present in a lengthened oligonucleotide, the additional nucleoside can be located at the 5′ or 3′ end of the oligonucleotide. When two or more additional nucleosides are present, the added nucleosides can be adjacent to each other, for example, in an oligonucleotide having two nucleosides added to the 5′ end (5′ addition), or alternatively to the 3′ end (3′ addition), of the oligonucleotide. Alternatively, the added nucleoside can be dispersed throughout the antisense compound, for example, in an oligonucleotide having one nucleoside added to the 5′ end and one subunit added to the 3′ end.

[0151] It is possible to increase or decrease the length of an antisense compound, such as an antisense oligonucleotide, and/or introduce mismatch bases without eliminating activity. For example, in Woolf et al. (Proc. Natl. Acad. Sci. USA 89:7305-7309, 1992), a series of antisense oligonucleotides 13-25 nucleobases in length were tested for their ability to induce cleavage of a target RNA in an oocyte injection model. Antisense oligonucleotides 25 nucleobases in length with 8 or 11 mismatch bases near the ends of the antisense oligonucleotides were able to direct specific cleavage of the target mRNA, albeit to a lesser extent than the antisense oligonucleotides that contained no mismatches. Similarly, target specific cleavage was achieved using 13 nucleobase antisense oligonucleotides, including those with 1 or 3 mismatches.

[0152] Gautschi et al (J. Natl. Cancer Inst. 93:463-471, March 2001) demonstrated the ability of an oligonucleotide having 100% complementarity to the bcl-2 mRNA and having 3 mismatches to the bcl-xL mRNA to reduce the expression of both bcl-2 and bcl-xL in vitro and in vivo. Furthermore, this oligonucleotide demonstrated potent anti-tumor activity in vivo.

[0153] Maher and Dolnick (Nuc. Acid. Res. 16:3341-3358, 1988) tested a series of tandem 14 nucleobase antisense oligonucleotides, and a 28 and 42 nucleobase antisense oligonucleotides comprised of the sequence of two or three of the tandem antisense oligonucleotides, respectively, for their ability to arrest translation of human DHFR in a rabbit reticulocyte assay. Each of the three 14 nucleobase antisense oligonucleotides alone was able to inhibit translation, albeit at a more modest level than the 28 or 42 nucleobase antisense oligonucleotides.

### Antisense Compound Motifs

[0154] In certain embodiments, antisense compounds targeted to a TTC39 nucleic acid have chemically modified subunits arranged in patterns, or motifs, to confer to the antisense compounds properties such as enhanced the inhibitory activity, increased binding affinity for a target nucleic acid, or resistance to degradation by in vivo nucleases.

[0155] Chimeric antisense compounds typically contain at least one region modified so as to confer increased resistance to nuclease degradation, increased cellular uptake, increased binding affinity for the target nucleic acid, and/or increased inhibitory activity. A second region of a chimeric antisense compound can optionally serve as a substrate for the cellular endonuclease RNase H, which cleaves the RNA strand of an RNA:DNA duplex.

[0156] Antisense compounds having a gapmer motif are considered chimeric antisense compounds. In a gapmer an internal region having a plurality of nucleotides that supports RNase H cleavage is positioned between external regions having a plurality of nucleotides that are chemically distinct from the nucleosides of the internal region. In the case of an antisense oligonucleotide having a gapmer motif, the gap segment generally serves as the substrate for endonuclease cleavage, while the wing segments comprise modified nucleosides. In certain embodiments, the regions of a gapmer are differentiated by the types of sugar moieties comprising each distinct region. The types of sugar moieties that are used to differentiate the regions of a gapmer can in some embodiments include β-D-ribonucleosides, β-D-deoxyribonucleosides, 2′-modified nucleosides (such 2′-modified nucleosides can include 2′-MOE, and 2′-O—CH₃, among others), and bicyclic sugar modified nucleosides (such bicyclic sugar modified nucleosides can include those having a 4′-(CH2)n-O-2′ bridge, where n=1 or n=2). Preferably, each distinct region comprises uniform sugar moieties. The wing-gap-wing motif is frequently described as “X-Y-Z”, where “X” represents the length of the 5′ wing region, “Y” represents the length of the gap region, and “Z” represents the length of the 3′ wing region. As used herein, a gapmer described as “X-Y-Z” has a configuration such that the gap segment is positioned immediately adjacent each of the 5′ wing segment and the 3′ wing segment. Thus, no intervening nucleotides exist between the 5′ wing segment and gap segment, or the gap segment and the 3′ wing segment. Any of the antisense compounds described herein can have a gapmer motif. In some embodiments, X and Z are the same, in other embodiments they are different. In a preferred embodiment, Y is between 8 and 15 nucleotides. X, Y or Z can be any of 1, 2, 3, 4, 5, 6, 7, 8, 9, 10, 11, 12, 13, 14, 15, 16, 17, 18, 19, 20, 25, 30 or more nucleotides. Thus, gapmers include, but are not limited to, for example 5-10-5, 4-8-4, 4-12-3, 4-12-4, 3-14-3, 2-13-5, 2-16-2, 1-18-1, 3-10-3, 2-10-2, 1-10-1, 2-8-2, 6-8-6 or 5-8-5.

[0157] In certain embodiments, the antisense compound as a “wingmer” motif, having a wing-gap or gap-wing configuration, i.e. an X-Y or Y-Z configuration as described above for the gapmer configuration. Thus, wingmer configurations include, but are not limited to, for example 5-10, 8-4, 4-12, 12-4, 3-14, 16-2, 18-1, 10-3, 2-10, 1-10, 8-2, 2-13, or 5-13.

[0158] In certain embodiments, antisense compounds targeted to a TTC39 nucleic acid possess a 5-10-5 gapmer motif.

[0159] In certain embodiments, an antisense compound targeted to a TTC39 nucleic acid has a gap-widened motif.

[0160] In certain embodiments, an antisense oligonucleotide targeted to a TTC39 nucleic acid has a gap segment of ten 2′-deoxyribonucleotides positioned immediately adjacent to and between wing segments of five chemically modified nucleosides. In certain embodiments, the chemical modification comprises a 2′-sugar modification. In another embodiment, the chemical modification comprises a 2′-MOE sugar modification.

### Target Nucleic Acids, Target Regions and Nucleotide Sequences

[0161] Nucleotide sequences that encode TTC39 include, without limitation, the following. The TTC39A isoform can have the human sequence as set forth in GenBank Accession No. NM_{—}001144832.1 (incorporated herein as SEQ ID NO: 2) or the murine sequences as set forth in GenBank Accession No. NM_{—}001145948.1 (incorporated herein as SEQ ID NO: 4) and GenBank Accession No. NM_{—}001134519.1 (incorporated herein as SEQ ID NO: 5). The TTC39β isoform can have the human sequence as set forth in GenBank Accession No. NM_{—}152574.1 (incorporated herein as SEQ ID NO: 1) and GenBank Accession No. NT_{—}008413.17, position 15158001 to 15300000 (SEQ ID NO: 15) or the murine sequences as set forth in GenBank Accession No. NM_{—}027238.2 (incorporated herein as SEQ ID NO: 6) and GenBank Accession No. NM_{—}001106665.1 (incorporated herein as SEQ ID NO: 7). The TTC39C isoform has the human sequence as set forth in GenBank Accession No. NM_{—}153211.3 (incorporated herein as SEQ ID NO: 3) or NM_{—}028341.4 (incorporated herein as SEQ ID NO: 8) and GenBank Accession No. NM_{—}001077231.1 (incorporated herein as SEQ ID NO: 9).

[0162] It is understood that the sequence set forth in each SEQ ID NO in the Examples contained herein is independent of any modification to a sugar moiety, an internucleoside linkage, or a nucleobase. As such, antisense compounds defined by a SEQ ID NO can comprise, independently, one or more modifications to al sugar moiety, an internucleoside linkage, or a nucleobase. Antisense compounds described by Isis Number (Isis No) indicate a combination of nucleobase sequence and motif.

[0163] In certain embodiments, a target region is a structurally defined region of the target nucleic acid. For example, a target region can encompass a 3′ UTR, a 5′ UTR, an exon, an intron, an exon/intron junction, a coding region, a translation initiation region, translation termination region, or other defined nucleic acid region. The structurally defined regions for TTC39 can be obtained by accession number from sequence databases such as NCBI and such information is incorporated herein by reference. In certain embodiments, a target region can encompass the sequence from a 5′ target site of one target segment within the target region to a 3′ target site of another target segment within the target region.

[0164] Targeting includes determination of at least one target segment to which an antisense compound hybridizes, such that a desired effect occurs. In certain embodiments, the desired effect is a reduction in mRNA target nucleic acid levels. In certain embodiments, the desired effect is reduction of levels of protein encoded by the target nucleic acid or a phenotypic change associated with the target nucleic acid.

[0165] A target region can contain one or more target segments. Multiple target segments within a target region can be overlapping. Alternatively, they can be non-overlapping. In certain embodiments, target segments within a target region are separated by no more than about 300 nucleotides. In certain embodiments, target segments within a target region are separated by a number of nucleotides that is, is about, is no more than, is no more than about, 250, 200, 150, 100, 90, 80, 70, 60, 50, 40, 30, 20, or 10 nucleotides on the target nucleic acid, or is a range defined by any two of the preceding values. In certain embodiments, target segments within a target region are separated by no more than, or no more than about, 5 nucleotides on the target nucleic acid. In certain embodiments, target segments are contiguous. Contemplated are target regions defined by a range having a starting nucleic acid that is any of the 5′ target sites or 3′ target sites listed herein. The target region starting at any of the 5′ or 3′ targets sites listed herein can extend 250, 200, 150, 100, 90, 80, 70, 60, 50, 40, 30, 20, or 10 nucleotides upstream or downstream of the site.

[0166] Suitable target segments can be found within a 5′ UTR, a coding region, a 3′ UTR, an intron, an exon, or an exon/intron junction. Target segments containing a start codon or a stop codon are also suitable target segments. A suitable target segment can specifically exclude a certain structurally defined region such as the start codon or stop codon.

[0167] The determination of suitable target segments can include a comparison of the sequence of a target nucleic acid to other sequences throughout the genome. For example, the BLAST algorithm can be used to identify regions of similarity amongst different nucleic acids. This comparison can prevent the selection of antisense compound sequences that can hybridize in a non-specific manner to sequences other than a selected target nucleic acid (i.e., non-target or off-target sequences).

[0168] There can be variation in activity (e.g., as defined by percent reduction of target nucleic acid levels) of the antisense compounds within an active target region. In certain embodiments, reductions in TTC39 mRNA levels are indicative of inhibition of TTC39 protein expression. Reductions in levels of a TTC39 protein are also indicative of inhibition of target mRNA expression. Further, phenotypic changes, such as an increase in HDL, apoA1 or apoA4 levels, or a decrease in PCSK9 levels can be indicative of inhibition of TTC39 mRNA and/or protein expression.

### Hybridization

[0169] In some embodiments, hybridization occurs between an antisense compound disclosed herein and a TTC39 nucleic acid. The most common mechanism of hybridization involves hydrogen bonding (e.g., Watson-Crick, Hoogsteen or reversed Hoogsteen hydrogen bonding) between complementary nucleobases of the nucleic acid molecules.

[0170] Hybridization can occur under varying conditions. Stringent conditions are sequence-dependent and are determined by the nature and composition of the nucleic acid molecules to be hybridized.

[0171] Methods of determining whether a sequence is specifically hybridizable to a target nucleic acid are well known in the art (Sambrooke and Russell, Molecular Cloning: A Laboratory Manual, 3^{rd} Ed., 2001). In certain embodiments, the antisense compounds provided herein are specifically hybridizable with a TTC39 nucleic acid.

### Complementarity

[0172] An antisense compound and a target nucleic acid are complementary to each other when a sufficient number of nucleobases of the antisense compound can hydrogen bond with the corresponding nucleobases of the target nucleic acid, such that a desired effect will occur (e.g., antisense inhibition of a target nucleic acid, such as a TTC39 nucleic acid).

[0173] An antisense compound can hybridize over one or more segments of a TTC39 nucleic acid such that intervening or adjacent segments are not involved in the hybridization event (e.g., a loop structure, mismatch or hairpin structure).

[0174] In certain embodiments, the antisense compounds provided herein, or a specified portion thereof, are, or are at least, 70%, 80%, 85%, 86%, 87%, 88%, 89%, 90%, 91%, 92%, 93%, 94%, 95%, 96%, 97%, 98%, 99%, or 100% complementary to a TTC39 nucleic acid, a target region, target segment, or specified portion thereof. Percent complementarity of an antisense compound with a target nucleic acid can be determined using routine methods.

[0175] For example, an antisense compound in which 18 of 20 nucleobases of the antisense compound are complementary to a target region, and would therefore specifically hybridize, would represent 90 percent complementarity. In this example, the remaining noncomplementary nucleobases can be clustered or interspersed with complementary nucleobases and need not be contiguous to each other or to complementary nucleobases. As such, an antisense compound which is 18 nucleobases in length having 4 (four) noncomplementary nucleobases which are flanked by two regions of complete complementarity with the target nucleic acid would have 77.8% overall complementarity with the target nucleic acid and would thus fall within the scope of the present invention. Percent complementarity of an antisense compound with a region of a target nucleic acid can be determined routinely using BLAST programs (basic local alignment search tools) and PowerBLAST programs known in the art (Altschul et al., J. Mol. Biol., 1990, 215, 403 410; Zhang and Madden, Genome Res., 1997, 7, 649 656). Percent homology, sequence identity or complementarity, can be determined by, for example, the Gap program (Wisconsin Sequence Analysis Package, Version 8 for Unix, Genetics Computer Group, University Research Park, Madison Wis.), using default settings, which uses the algorithm of Smith and Waterman (Adv. Appl. Math., 1981, 2, 482 489).

[0176] In certain embodiments, the antisense compounds provided herein, or specified portions thereof, are fully complementary (i.e. 100% complementary) to a target nucleic acid, or specified portion thereof. For example, antisense compound can be fully complementary to a TTC39 nucleic acid, or a target region, or a target segment or target sequence thereof. As used herein, “fully complementary” means each nucleobase of an antisense compound is capable of precise base pairing with the corresponding nucleobases of a target nucleic acid. For example, a 20 nucleobase antisense compound is fully complementary to a target sequence that is 400 nucleobases long, so long as there is a corresponding 20 nucleobase portion of the target nucleic acid that is fully complementary to the antisense compound. Fully complementary can also be used in reference to a specified portion of the first and/or the second nucleic acid. For example, a 20 nucleobase portion of a 30 nucleobase antisense compound can be “fully complementary” to a target sequence that is 400 nucleobases long. The 20 nucleobase portion of the 30 nucleobase oligonucleotide is fully complementary to the target sequence if the target sequence has a corresponding 20 nucleobase portion wherein each nucleobase is complementary to the 20 nucleobase portion of the antisense compound. At the same time, the entire 30 nucleobase antisense compound can be fully complementary to the target sequence, depending on whether the remaining 10 nucleobases of the antisense compound are also complementary to the target sequence.

[0177] The location of a non-complementary nucleobase can be at the 5′ end or 3′ end of the antisense compound. Alternatively, the non-complementary nucleobase or nucleobases can be at an internal position of the antisense compound. When two or more non-complementary nucleobases are present, they can be either contiguous (i.e. linked) or non-contiguous. In one embodiment, a non-complementary nucleobase is located in the wing segment of a gapmer antisense oligonucleotide.

[0178] In certain embodiments, antisense compounds that are, or are up to, 12, 13, 14, 15, 16, 17, 18, 19, or 20 nucleobases in length comprise no more than 4, no more than 3, no more than 2, or no more than 1 non-complementary nucleobase(s) relative to a target nucleic acid, such as a TTC39 nucleic acid, or specified portion thereof.

[0179] In certain embodiments, antisense compounds that are, or are up to, 12, 13, 14, 15, 16, 17, 18, 19, 20, 21, 22, 23, 24, 25, 26, 27, 28, 29, or 30 nucleobases in length comprise no more than 6, no more than 5, no more than 4, no more than 3, no more than 2, or no more than 1 non-complementary nucleobase(s) relative to a target nucleic acid, such as a TTC39 nucleic acid, or specified portion thereof.

[0180] The antisense compounds provided herein also include those which are complementary to a portion of a target nucleic acid. As used herein, “portion” refers to a defined number of contiguous (i.e. linked) nucleobases within a region or segment of a target nucleic acid. A “portion” can also refer to a defined number of contiguous nucleobases of an antisense compound. In certain embodiments, the antisense compounds are complementary to at least an 8 nucleobase portion of a target segment. In certain embodiments, the antisense compounds are complementary to at least a 12 nucleobase portion of a target segment. In certain embodiments, the antisense compounds are complementary to at least a 15 nucleobase portion of a target segment. Also contemplated are antisense compounds that are complementary to at least an 8, 9, 10, 11, 12, 13, 14, 15, 16, 17, 18, 19, 20, or more nucleobase portion of a target segment, or a range defined by any two of these values.

### Identity

[0181] The antisense compounds provided herein can also have a defined percent identity to a particular nucleotide sequence, SEQ ID NO, or compound represented by a specific Isis number, or portion thereof. As used herein, an antisense compound is identical to the sequence disclosed herein if it has the same nucleobase pairing ability. For example, a RNA which contains uracil in place of thymidine in a disclosed DNA sequence would be considered identical to the DNA sequence since both uracil and thymidine pair with adenine. Shortened and lengthened versions of the antisense compounds described herein as well as compounds having non-identical bases relative to the antisense compounds provided herein also are contemplated. The non-identical bases can be adjacent to each other or dispersed throughout the antisense compound. Percent identity of an antisense compound is calculated according to the number of bases that have identical base pairing relative to the sequence to which it is being compared.

[0182] In certain embodiments, the antisense compounds, or portions thereof, are at least 70%, 75%, 80%, 85%, 90%, 95%, 96%, 97%, 98%, 99% or 100% identical to one or more of the antisense compounds or SEQ ID NOs, or a portion thereof, disclosed herein.

### Modifications

[0183] A nucleoside is a base-sugar combination. The nucleobase (also known as base) portion of the nucleoside is normally a heterocyclic base moiety. Nucleotides are nucleosides that further include a phosphate group covalently linked to the sugar portion of the nucleoside. For those nucleosides that include a pentofuranosyl sugar, the phosphate group can be linked to the 2′, 3′ or 5′ hydroxyl moiety of the sugar. Oligonucleotides are formed through the covalent linkage of adjacent nucleosides to one another, to form a linear polymeric oligonucleotide. Within the oligonucleotide structure, the phosphate groups are commonly referred to as forming the internucleoside linkages of the oligonucleotide.

[0184] Modifications to antisense compounds encompass substitutions or changes to internucleoside linkages, sugar moieties, or nucleobases. Modified antisense compounds are often preferred over native forms because of desirable properties such as, for example, enhanced cellular uptake, enhanced affinity for nucleic acid target, increased stability in the presence of nucleases, or increased inhibitory activity.

[0185] Chemically modified nucleosides can also be employed to increase the binding affinity of a shortened or truncated antisense oligonucleotide for its target nucleic acid. Consequently, comparable results can often be obtained with shorter antisense compounds that have such chemically modified nucleosides.

### Modified Internucleoside Linkages

[0186] The naturally occurring internucleoside linkage of RNA and DNA is a 3′ to 5′ phosphodiester linkage. Antisense compounds having one or more modified, i.e. non-naturally occurring, internucleoside linkages are often selected over antisense compounds having naturally occurring internucleoside linkages because of desirable properties such as, for example, enhanced cellular uptake, enhanced affinity for target nucleic acids, and increased stability in the presence of nucleases.

[0187] Oligonucleotides having modified internucleoside linkages include internucleoside linkages that retain a phosphorus atom as well as internucleoside linkages that do not have a phosphorus atom. Representative phosphorus containing internucleoside linkages include, but are not limited to, phosphodiesters, phosphotriesters, methylphosphonates, phosphoramidate, and phosphorothioates. Methods of preparation of phosphorous-containing and non-phosphorous-containing linkages are well known.

[0188] In certain embodiments, antisense compounds targeted to a TTC39 nucleic acid comprise one or more modified internucleoside linkages. In certain embodiments, the modified internucleoside linkages are phosphorothioate linkages. In certain embodiments, each internucleoside linkage of an antisense compound is a phosphorothioate internucleoside linkage.

### Modified Sugar Moieties

[0189] Antisense compounds of the invention can optionally contain one or more nucleosides wherein the sugar group has been modified. Such sugar modified nucleosides may impart enhanced nuclease stability, increased binding affinity or some other beneficial biological property to the antisense compounds. In certain embodiments, nucleosides comprise a chemically modified ribofuranose ring moieties. Examples of chemically modified ribofuranose rings include without limitation, addition of substitutent groups (including 5′ and 2′ substituent groups, bridging of non-geminal ring atoms to form bicyclic nucleic acids (BNA), replacement of the ribosyl ring oxygen atom with S, N(R), or C(R1)(R)2 (R═H, C1-C12 alkyl or a protecting group) and combinations thereof. Examples of chemically modified sugars include 2′-F-5′-methyl substituted nucleoside (see PCT International Application WO 2008/101157 Published on Aug. 21, 2008 for other disclosed 5′,2′-bis substituted nucleosides) or replacement of the ribosyl ring oxygen atom with S with further substitution at the 2′-position (see published U.S. Patent Application US2005-0130923, published on Jun. 16, 2005) or alternatively 5′-substitution of a BNA (see PCT International Application WO 2007/134181 Published on Nov. 22, 2007 wherein LNA is substituted with for example a 5′-methyl or a 5′-vinyl group).

[0190] Examples of nucleosides having modified sugar moieties include without limitation nucleosides comprising 5′-vinyl, 5′-methyl (R or S), 4′-S, 2′-F, 2′-OCH3 and 2′-O(CH2)2OCH3 substituent groups. The substituent at the 2′ position can also be selected from allyl, amino, azido, thio, O-allyl, O—C1-C10 alkyl, OCF3, O(CH2)2SCH3, O(CH2)2-O—N(Rm)(Rn), and O—CH2-C(═O)—N(Rm)(Rn), where each Rm and Rn is, independently, H or substituted or unsubstituted C1-C10 alkyl, O-alkaryl or O-aralkyl, substituted alkyl, alkenyl, alkynyl, alkaryl, aralkyl, SH, SCH₃, OCN, Cl, Br, CN, SOCH₃, SO₂CH₃, ONO₂, NO₂, N₃, NH₂, heterocycloalkyl, heterocycloalkaryl, aminoalkylamino, polyalkylamino, substituted silyl, an RNA cleaving group, a reporter group, an intercalator, a group for improving pharmacokinetic properties, or a group for improving the pharmacodynamic properties of an antisense compound, and other substituents having similar properties

[0191] Examples of bicyclic nucleic acids (BNAs) include without limitation nucleosides comprising a bridge between the 4′ and the 2′ ribosyl ring atoms. In certain embodiments, antisense compounds provided herein include one or more BNA nucleosides wherein the bridge comprises one of the formulas: 4′-(CH2)-O-2′ (LNA); 4′-(CH2)-S-2; 4′-(CH2)2-O-2′ (ENA); 4′-C(CH3)2-O-2′ (see PCT/US2008/068922); 4′-CH(CH3)-O-2′ and 4′-CH(CH₂OCH3)-O-2′ (see U.S. Pat. No. 7,399,845, issued on Jul. 15, 2008); 4′-CH2-N(OCH3)-2′ (see PCT/US2008/064591); 4′-CH2-O—N(CH3)-2′ (see published U.S. Patent Application US2004-0171570, published Sep. 2, 2004); 4′-CH2-N(R)—O-2′ (see U.S. Pat. No. 7,427,672, issued on Sep. 23, 2008); 4′-CH2-CH(CH3)-2′ (see Chattopadhyaya et al., J. Org. Chem., 2009, 74, 118-134) and 4′-CH2-C(═CH2)-2′ (see PCT/US2008/066154); and wherein R is, independently, H, C1-C12 alkyl, or a protecting group. Each of the foregoing BNAs include various stereochemical sugar configurations including for example α-L-ribofuranose and β-D-ribofuranose (see PCT international application PCT/DK98/00393, published on Mar. 25, 1999 as WO 99/14226). Previously, α-L-methyleneoxy (4′-CH₂—O-2′) BNA's have also been incorporated into antisense oligonucleotides that showed antisense activity (Frieden et al., Nucleic Acids Research, 2003, 21, 6365-6372).

[0192] Further reports related to bicyclic nucleosides can be found in published literature (see for example: Srivastava et al., J. Am. Chem. Soc., 2007, 129, 8362-8379; U.S. Pat. Nos. 7,053,207; 6,268,490; 6,770,748; 6,794,499; 7,034,133; and 6,525,191; Elayadi et al., Curr. Opinion Invens. Drugs, 2001, 2, 558-561; Braasch et al., Chem. Biol., 2001, 8, 1-7; and Orum et al., Curr. Opinion Mol. Ther., 2001, 3, 239-243; and U.S. Pat. No. 6,670,461; International applications WO 2004/106356; WO 94/14226; WO 2005/021570; U.S. Patent Publication Nos. US2004-0171570; US2007-0287831; US2008-0039618; U.S. Pat. No. 7,399,845; U.S. patent Ser. Nos. 12/129,154; 60/989,574; 61/026,995; 61/026,998; 61/056,564; 61/086,231; 61/097,787; 61/099,844; PCT International Applications Nos. PCT/US2008/064591; PCT/US2008/066154; PCT/US2008/068922; and Published PCT International Applications WO 2007/134181).

[0193] In certain embodiments, bicyclic sugar moieties of BNA nucleosides include, but are not limited to, compounds having at least one bridge between the 4′ and the 2′ position of the pentofuranosyl sugar moiety wherein such bridges independently comprises 1 or from 2 to 4 linked groups independently selected from —[C(Rₐ)(R_{b})]ₙ—, —C(Rₐ)═C(R_{b})—, —C(Rₐ)═N—, —C(═O)—, —C(═NRₐ)—, —C(═S)—, —O—, —Si(Rₐ)₂—, —S(═O)ₓ—, and —N(Rₐ)—;

[0194] wherein:

[0195] x is 0, 1, or 2;

[0196] n is 1, 2, 3, or 4;

[0197] each Rₐ and R_{b} is, independently, H, a protecting group, hydroxyl, C₁-C₁₂ alkyl, substituted C₁-C₁₂ alkyl, C₂-C₁₂ alkenyl, substituted C₂-C₁₂ alkenyl, C₂-C₁₂ alkynyl, substituted C₂-C₁₂ alkynyl, C₅-C₂₀ aryl, substituted C₅-C₂₀ aryl, heterocycle radical, substituted heterocycle radical, heteroaryl, substituted heteroaryl, C₅-C₇ alicyclic radical, substituted C₅-C₇ alicyclic radical, halogen, OJ₁, NJ₁J₂, SJ₁, N₃, COOJ₁, acyl (C(═O)—H), substituted acyl, CN, sulfonyl (S(═O)₂-J₁), or sulfoxyl (S(═O)-J₁); and

[0198] each J₁ and J₂ is, independently, H, C₁-C₁₂ alkyl, substituted C₁-C₁₂ alkyl, C₂-C₁₂ alkenyl, substituted C₂-C₁₂ alkenyl, C₂-C₁₂ alkynyl, substituted C₂-C₁₂ alkynyl, C₅-C₂₀ aryl, substituted C₅-C₂₀ aryl, acyl (C(═O)—H), substituted acyl, a heterocycle radical, a substituted heterocycle radical, C₁-C₁₂ aminoalkyl, substituted C₁-C₁₂ aminoalkyl or a protecting group.

[0199] In certain embodiments, the bridge of a bicyclic sugar moiety is, —[C(Rₐ)(R_{b})]ₙ—, —[C(Rₐ)(R_{b})]ₙ—O—, —C(RₐR_{b})—N(R)—O— or —C(RₐR_{b})—O—N(R)—. In certain embodiments, the bridge is 4′-CH₂-2′, 4′-(CH₂)₃-2′, 4′-CH₂—O-2′, 4′-(CH₂)₂—O-2′, 4′-CH₂—O—N(R)-2′ and 4′-CH₂—N(R)—O-2′-wherein each R is, independently, H, a protecting group or C₁-C₁₂ alkyl.

[0200] In certain embodiments, bicyclic nucleosides include, but are not limited to, (A) α-L-Methyleneoxy (4′-CH₂—O-2′) BNA, (B) β-D-Methyleneoxy (4′-CH₂—O-2′) BNA, (C) Ethyleneoxy (4′-(CH₂)₂—O-2′) BNA, (D) Aminooxy (4′-CH₂—O—N(R)-2′) BNA, (E) Oxyamino (4′-CH₂—N(R)—O-2′) BNA, and (F) Methyl(methyleneoxy) (4′-CH(CH₃)—O-2′) BNA, (G) Methylene-thio (4′-CH₂—S-2′) BNA, (H) Methylene-amino (4′-CH₂—N(R)-2′) BNA, (I) Methyl carbocyclic (4′-CH₂—CH(CH₃)-2′) BNA, and (J) Propylene carbocyclic (4′-(CH₂)₃-2′) BNA as depicted below.

[chemical structure]

[chemical structure]

wherein Bx is the base moiety and R is independently H, a protecting group or C₁-C₁₂ alkyl.

[0201] In certain embodiments, bicyclic nucleoside having Formula I:

[chemical structure]

wherein:

[0202] Bx is a heterocyclic base moiety;

[0203] -Qₐ-Q_{b}-Q_{c}- is —CH₂—N(R_{c})—CH₂—, —C(═O)—N(R_{c})—CH₂—, —CH₂—O—N(R_{c})—, —CH₂—N(R_{c})—O— or —N(R_{c})—O—CH₂;

[0204] R_{c} is C₁-C₁₂ alkyl or an amino protecting group; and

[0205] Tₐ and T_{b} are each, independently H, a hydroxyl protecting group, a conjugate group, a reactive phosphorus group, a phosphorus moiety or a covalent attachment to a support medium.

[0206] In certain embodiments, bicyclic nucleoside having Formula II:

[chemical structure]

wherein:

[0207] Bx is a heterocyclic base moiety;

[0208] Tₐ and T_{b} are each, independently H, a hydroxyl protecting group, a conjugate group, a reactive phosphorus group, a phosphorus moiety or a covalent attachment to a support medium;

[0209] Zₐ is C₁-C₆ alkyl, C₂-C₆ alkenyl, C₂-C₆ alkynyl, substituted C₁-C₆ alkyl, substituted C₂-C₆ alkenyl, substituted C₂-C₆ alkynyl, acyl, substituted acyl, substituted amide, thiol or substituted thio.

[0210] In one embodiment, each of the substituted groups is, independently, mono or poly substituted with substituent groups independently selected from halogen, oxo, hydroxyl, OJ_{c}, NJ_{c}J_{d}, SJ_{c}, N₃, OC(═X)J_{c}, and NJ_{c}C(═X)NJ_{c}J_{d}, wherein each J_{c}, J_{d} and Jₑ is, independently, H, C₁-C₆ alkyl, or substituted C₁-C₆ alkyl and X is O or NJ_{c}.

[0211] In certain embodiments, bicyclic nucleoside having Formula III:

[chemical structure]

wherein:

[0212] Bx is a heterocyclic base moiety;

[0213] Tₐ and T_{b} are each, independently H, a hydroxyl protecting group, a conjugate group, a reactive phosphorus group, a phosphorus moiety or a covalent attachment to a support medium;

[0214] Z_{b} is C₁-C₆ alkyl, C₂-C₆ alkenyl, C₂-C₆ alkynyl, substituted C₁-C₆ alkyl, substituted C₂-C₆ alkenyl, substituted C₂-C₆ alkynyl or substituted acyl (C(═O)—).

[0215] In certain embodiments, bicyclic nucleoside having Formula IV:

[chemical structure]

wherein:

[0216] Bx is a heterocyclic base moiety;

[0217] Tₐ and T_{b} are each, independently H, a hydroxyl protecting group, a conjugate group, a reactive phosphorus group, a phosphorus moiety or a covalent attachment to a support medium;

[0218] R_{d} is C₁-C₆ alkyl, substituted C₁-C₆ alkyl, C₂-C₆ alkenyl, substituted C₂-C₆ alkenyl, C₂-C₆ alkynyl or substituted C₂-C₆ alkynyl;

[0219] each qₐ, q_{b}, q_{c} and q_{d} is, independently, H, halogen, C₁-C₆ alkyl, substituted C₁-C₆ alkyl, C₂-C₆ alkenyl, substituted C₂-C₆ alkenyl, C₂-C₆ alkynyl or substituted C₂-C₆ alkynyl, C₁-C₆ alkoxyl, substituted C₁-C₆ alkoxyl, acyl, substituted acyl, C₁-C₆ aminoalkyl or substituted C₁-C₆ aminoalkyl;

[0220] In certain embodiments, bicyclic nucleoside having Formula V:

[chemical structure]

wherein:

[0221] Bx is a heterocyclic base moiety;

[0222] Tₐ and T_{b} are each, independently H, a hydroxyl protecting group, a conjugate group, a reactive phosphorus group, a phosphorus moiety or a covalent attachment to a support medium;

[0223] qₐ, q_{b}, qₑ and g_{f} are each, independently, hydrogen, halogen, C₁-C₁₂ alkyl, substituted C₁-C₁₂ alkyl, C₂-C₁₂ alkenyl, substituted C₂-C₁₂ alkenyl, C₂-C₁₂ alkynyl, substituted C₂-C₁₂ alkynyl, C₁-C₁₂ alkoxy, substituted C₁-C₁₂ alkoxy, OJⱼ, SJⱼ, SOJⱼ, SO₂Jⱼ, NJⱼJₖ, N₃, CN, C(═O)OJⱼ, C(═O)NJⱼJₖ, C(═O)Jⱼ, O—C(═O)NJⱼJₖ, N(H)C(═NH)NJⱼJₖ, N(H)C(═O)NJⱼJₖ or N(H)C(═S)NJⱼJₖ;

[0224] or qₑ and g_{f} together are ═C(q_{g})(qₕ);

[0225] q_{g} and qₕ are each, independently, H, halogen, C₁-C₁₂ alkyl or substituted C₁-C₁₂ alkyl.

[0226] The synthesis and preparation of the methyleneoxy (4′-CH₂—O-2′) BNA monomers adenine, cytosine, guanine, 5-methyl-cytosine, thymine and uracil, along with their oligomerization, and nucleic acid recognition properties have been described (Koshkin et al., Tetrahedron, 1998, 54, 3607-3630). BNAs and preparation thereof are also described in WO 98/39352 and WO 99/14226.

[0227] Analogs of methyleneoxy (4′-CH₂—O-2′) BNA and 2′-thio-BNAs, have also been prepared (Kumar et al., Bioorg. Med. Chem. Lett., 1998, 8, 2219-2222). Preparation of locked nucleoside analogs comprising oligodeoxyribonucleotide duplexes as substrates for nucleic acid polymerases has also been described (Wengel et al., WO 99/14226). Furthermore, synthesis of T-amino-BNA, a novel comformationally restricted high-affinity oligonucleotide analog has been described in the art (Singh et al., J. Org. Chem., 1998, 63, 10035-10039). In addition, 2′-amino- and 2′-methylamino-BNA's have been prepared and the thermal stability of their duplexes with complementary RNA and DNA strands has been previously reported.

[0228] In certain embodiments, bicyclic nucleoside having Formula VI:

[chemical structure]

wherein:

[0229] Bx is a heterocyclic base moiety;

[0230] Tₐ and T_{b} are each, independently H, a hydroxyl protecting group, a conjugate group, a reactive phosphorus group, a phosphorus moiety or a covalent attachment to a support medium;

[0231] each qᵢ, qⱼ, qₖ and qₗ is, independently, H, halogen, C₁-C₁₂ alkyl, substituted C₁-C₁₂ alkyl, C₂-C₁₂ alkenyl, substituted C₂-C₁₂ alkenyl, C₂-C₁₂ alkynyl, substituted C₂-C₁₂ alkynyl, C₁-C₁₂ alkoxyl, substituted C₁-C₁₂ alkoxyl, OJⱼ, SJⱼ, SOJⱼ, SO₂Jⱼ, NJⱼJₖ, N₃, CN, C(═O)OJⱼ, C(═O)NJⱼJₖ, C(═O)Jⱼ, O—C(═O)NJⱼJₖ, N(H)C(═NH)NJⱼJₖ, N(H)C(═O)NJⱼJₖ or N(H)C(═S)NJⱼJₖ; and

[0232] qᵢ and qⱼ or qₗ and qₖ together are ═C(q_{g})(qₕ), wherein q_{g} and qₕ are each, independently, H, halogen, C₁-C₁₂ alkyl or substituted C₁-C₁₂ alkyl.

[0233] One carbocyclic bicyclic nucleoside having a 4′-(CH₂)₃-2′ bridge and the alkenyl analog bridge 4′-CH═CH—CH₂-2′ have been described (Freier et al., Nucleic Acids Research, 1997, 25(22), 4429-4443 and Albaek et al., J. Org. Chem., 2006, 71, 7731-7740). The synthesis and preparation of carbocyclic bicyclic nucleosides along with their oligomerization and biochemical studies have also been described (Srivastava et al., J. Am. Chem. Soc., 2007, 129(26), 8362-8379).

[0234] In certain embodiments, nucleosides are modified by replacement of the ribosyl ring with a sugar surrogate. Such modification includes without limitation, replacement of the ribosyl ring with a surrogate ring system (sometimes referred to as DNA analogs) such as a morpholino ring, a cyclohexenyl ring, a cyclohexyl ring or a tetrahydropyranyl ring such as one having one of the formula:

[chemical structure]

[0235] Many other bicyclo and tricyclo sugar surrogate ring systems are also know in the art that can be used to modify nucleosides for incorporation into antisense compounds (see for example review article: Leumann, Christian J., Bioorg. Med. Chem., 2002, 10, 841-854)). Such ring systems can undergo various additional substitutions to enhance activity. See for example compounds having Formula VII:

[chemical structure]

wherein independently for each of said at least one tetrahydropyran nucleoside analog of Formula VII:

[0236] Bx is a heterocyclic base moiety;

[0237] Tₐ and T_{b} are each, independently, an internucleoside linking group linking the tetrahydropyran nucleoside analog to the antisense compound or one of Tₐ and T_{b} is an internucleoside linking group linking the tetrahydropyran nucleoside analog to the antisense compound and the other of Tₐ and T_{b} is H, a hydroxyl protecting group, a linked conjugate group or a 5′ or 3′-terminal group;

[0238] q₁, q₂, q₃, q₄, q₅, q₆ and q₇ are each independently, H, C₁-C₆ alkyl, substituted C₁-C₆ alkyl, C₂-C₆ alkenyl, substituted C₂-C₆ alkenyl, C₂-C₆ alkynyl or substituted C₂-C₆ alkynyl; and each of R₁ and R₂ is selected from hydrogen, hydroxyl, halogen, substituted or unsubstituted alkoxy, NJ₁J₂, SJ₁, N₃, OC(═X)J₁, OC(═X)NJ₁J₂, NJ₃C(═X)NJ₁J₂ and CN, wherein X is O, S or NJ₁ and each J₁, J₂ and J₃ is, independently, H or C₁-C₆ alkyl.

[0239] In certain embodiments, the modified THP nucleosides of Formula VII are provided wherein q₁, q₂, q₃, q₄, q₅, q₆ and q₇ are each H (M). In certain embodiments, at least one of q₁, q₂, q₃, q₄, q₅, q₆ and q₇ is other than H. In certain embodiments, at least one of q₁, q₂, q₃, q₄, q₅, q₆ and q₇ is methyl. In certain embodiments, THP nucleosides of Formula VII are provided wherein one of R₁ and R₂ is fluoro (K). In certain embodiments, THP nucleosides of Formula VII are provided wherein one of R₁ and R₂ is methoxyethoxy. In certain embodiments, R₁ is fluoro and R₂ is H; R₁ is H and R₂ is fluoro; R₁ is methoxy and R₂ is H, and R₁ is H and R₂ is methoxyethoxy. Methods for the preparations of modified sugars are well known to those skilled in the art.

[0240] In nucleotides having modified sugar moieties, the nucleobase moieties (natural, modified or a combination thereof) are maintained for hybridization with an appropriate nucleic acid target.

[0241] In certain embodiments, antisense compounds targeted to a Factor XI nucleic acid comprise one or more nucleotides having modified sugar moieties. In certain embodiments, the modified sugar moiety is 2′-MOE. In certain embodiments, the 2′-MOE modified nucleotides are arranged in a gapmer motif. In certain embodiments, the modified sugar moiety is a bicyclic nucleoside having a (4′-CH(CH₃)—O-2′) bridging group. In certain embodiments, the (4% CH(CH₃)—O-2′) modified nucleotides are arranged throughout the wings of a gapmer motif.

### Modified Nucleobases

[0242] Nucleobase (or base) modifications or substitutions are structurally distinguishable from, yet functionally interchangeable with, naturally occurring or synthetic unmodified nucleobases.

[0243] Both natural and modified nucleobases are capable of participating in hydrogen bonding. Such nucleobase modifications can impart nuclease stability, binding affinity or some other beneficial biological property to antisense compounds. Modified nucleobases include synthetic and natural nucleobases such as, for example, 5-methylcytosine (5-me-C). Certain nucleobase substitutions, including 5-methylcytosine substitutions, are particularly useful for increasing the binding affinity of an antisense compound for a target nucleic acid. For example, 5-methylcytosine substitutions have been shown to increase nucleic acid duplex stability by 0.6-1.2° C. (Sanghvi, Y. S., Crooke, S. T. and Lebleu, B., eds., Antisense Research and Applications, CRC Press, Boca Raton, 1993, pp. 276-278).

[0244] Additional unmodified nucleobases include 5-hydroxymethyl cytosine, xanthine, hypoxanthine, 2-aminoadenine, 6-methyl and other alkyl derivatives of adenine and guanine, 2-propyl and other alkyl derivatives of adenine and guanine, 2-thiouracil, 2-thiothymine and 2-thiocytosine, 5-halouracil and cytosine, 5-propynyl (—C≡C—CH₃) uracil and cytosine and other alkynyl derivatives of pyrimidine bases, 6-azo uracil, cytosine and thymine, 5-uracil (pseudouracil), 4-thiouracil, 8-halo, 8-amino, 8-thiol, 8-thioalkyl, 8-hydroxyl and other 8-substituted adenines and guanines, 5-halo particularly 5-bromo, 5-trifluoromethyl and other 5-substituted uracils and cytosines, 7-methylguanine and 7-methyladenine, 2-F-adenine, 2-amino-adenine, 8-azaguanine and 8-azaadenine, 7-deazaguanine and 7-deazaadenine and 3-deazaguanine and 3-deazaadenine.

[0245] Heterocyclic base moieties can also include those in which the purine or pyrimidine base is replaced with other heterocycles, for example 7-deaza-adenine, 7-deazaguanosine, 2-aminopyridine and 2-pyridone. Nucleobases that are particularly useful for increasing the binding affinity of antisense compounds include 5-substituted pyrimidines, 6-azapyrimidines and N-2, N-6 and O-6 substituted purines, including 2 aminopropyladenine, 5-propynyluracil and 5-propynylcytosine.

[0246] In certain embodiments, antisense compounds targeted to a TTC39 nucleic acid comprise one or more modified nucleobases. In certain embodiments, gap-widened antisense oligonucleotides targeted to a TTC39 nucleic acid comprise one or more modified nucleobases. In certain embodiments, the modified nucleobase is 5-methylcytosine. In certain embodiments, each cytosine is a 5-methylcytosine.

### Compositions and Methods for Formulating Pharmaceutical Compositions

[0247] Antisense oligonucleotides can be admixed with pharmaceutically acceptable active or inert substance for the preparation of pharmaceutical compositions or formulations. Compositions and methods for the formulation of pharmaceutical compositions are dependent upon a number of criteria, including, but not limited to, route of administration, extent of disease, or dose to be administered.

[0248] Antisense compound targeted to a TTC39 nucleic acid can be utilized in pharmaceutical compositions by combining the antisense compound with a suitable pharmaceutically acceptable diluent or carrier. A pharmaceutically acceptable diluent includes phosphate-buffered saline (PBS). PBS is a diluent suitable for use in compositions to be delivered parenterally. Accordingly, in one embodiment, employed in the methods described herein is a pharmaceutical composition comprising an antisense compound targeted to a TTC39 nucleic acid and a pharmaceutically acceptable diluent. In certain embodiments, the pharmaceutically acceptable diluent is PBS. In certain embodiments, the antisense compound is an antisense oligonucleotide.

[0249] Pharmaceutical compositions comprising antisense compounds encompass any pharmaceutically acceptable salts, esters, or salts of such esters, or any other oligonucleotide which, upon administration to an animal, including a human, is capable of providing (directly or indirectly) the biologically active metabolite or residue thereof. Accordingly, for example, the disclosure is also drawn to pharmaceutically acceptable salts of antisense compounds, prodrugs, pharmaceutically acceptable salts of such prodrugs, and other bioequivalents. Suitable pharmaceutically acceptable salts include, but are not limited to, sodium and potassium salts.

[0250] A prodrug can include the incorporation of additional nucleosides at one or both ends of an antisense compound which are cleaved by endogenous nucleases within the body, to form the active antisense compound.

### Conjugated Antisense Compounds

[0251] Antisense compounds can be covalently linked to one or more moieties or conjugates which enhance the activity, cellular distribution or cellular uptake of the resulting antisense oligonucleotides. Typical conjugate groups include cholesterol moieties and lipid moieties. Additional conjugate groups include carbohydrates, phospholipids, biotin, phenazine, folate, phenanthridine, anthraquinone, acridine, fluoresceins, rhodamines, coumarins, and dyes.

[0252] Antisense compounds can also be modified to have one or more stabilizing groups that are generally attached to one or both termini of antisense compounds to enhance properties such as, for example, nuclease stability. Included in stabilizing groups are cap structures. These terminal modifications protect the antisense compound having terminal nucleic acid from exonuclease degradation, and can help in delivery and/or localization within a cell. The cap can be present at the 5′-terminus (5′-cap), or at the 3′-terminus (3′-cap), or can be present on both termini. Cap structures are well known in the art and include, for example, inverted deoxy abasic caps. Further 3′ and 5′-stabilizing groups that can be used to cap one or both ends of an antisense compound to impart nuclease stability include those disclosed in WO 03/004602 published on Jan. 16, 2003.

### Cell Culture and Antisense Compounds Treatment

[0253] The effects of antisense compounds on the level, activity or expression of TTC39 nucleic acids can be tested in vitro in a variety of cell types. Cell types used for such analyses are available from commercial vendors (e.g. American Type Culture Collection, Manassas, Va.; Zen-Bio, Inc., Research Triangle Park, NC; Clonetics Corporation, Walkersville, Md.) and cells are cultured according to the vendor's instructions using commercially available reagents (e.g. Invitrogen Life Technologies, Carlsbad, Calif.). Illustrative cell types include, but are not limited to, HepG2 cells, Hep3B cells, primary hepatocytes, A549 cells, GM04281 fibroblasts and LLC-MK2 cells.

[0254] In Vitro Testing of Antisense Oligonucleotides

[0255] Described herein are methods for treatment of cells with antisense oligonucleotides, which can be modified appropriately for treatment with other antisense compounds.

[0256] In general, cells are treated with antisense oligonucleotides when the cells reach approximately 60-80% confluence in culture.

[0257] One reagent commonly used to introduce antisense oligonucleotides into cultured cells is the cationic lipid transfection reagent LIPOFECTIN® (Invitrogen, Carlsbad, Calif.). Antisense oligonucleotides can be mixed with LIPOFECTIN® in OPTI-MEM® 1 (Invitrogen, Carlsbad, Calif.) to achieve a desired final concentration of antisense oligonucleotide and LIPOFECTIN® concentration that typically ranges 2 to 12 ug/mL per 100 nM antisense oligonucleotide.

[0258] Another reagent that can be used to introduce antisense oligonucleotides into cultured cells is LIPOFECTAMINE 2000® (Invitrogen, Carlsbad, Calif.). Antisense oligonucleotide can be mixed with LIPOFECTAMINE 2000® in OPTI-MEM® 1 reduced serum medium (Invitrogen, Carlsbad, Calif.) to achieve a desired concentration of antisense oligonucleotide and LIPOFECTAMINE® concentration that typically ranges 2 to 12 ug/mL per 100 nM antisense oligonucleotide.

[0259] Another reagent that can be used to introduce antisense oligonucleotides into cultured cells is Cytofectin® (Invitrogen, Carlsbad, Calif.). Antisense oligonucleotide can be mixed with Cytofectin® in OPTI-MEM® 1 reduced serum medium (Invitrogen, Carlsbad, Calif.) to achieve a desired concentration of antisense oligonucleotide and Cytofectin® concentration that typically ranges 2 to 12 ug/mL per 100 nM antisense oligonucleotide.

[0260] Another technique that can be used to introduce antisense oligonucleotides into cultured cells is electroporation.

[0261] Cells are treated with antisense oligonucleotides by routine methods. Cells are typically harvested 16-24 hours after antisense oligonucleotide treatment, at which time RNA or protein levels of target nucleic acids are measured by methods known in the art and described herein. In general, when treatments are performed in multiple replicates, the data are presented as the average of the replicate treatments.

[0262] The concentration of antisense oligonucleotide used varies from cell line to cell line. Methods to determine the optimal antisense oligonucleotide concentration for a particular cell line are well known in the art. Antisense oligonucleotides are typically used at concentrations ranging from 1 nM to 300 nM when transfected with LIPOFECTAMINE2000®, Lipofectin or Cytofectin. Antisense oligonucleotides are used at higher concentrations ranging from 625 to 20,000 nM when transfected using electroporation.

### RNA Isolation

[0263] RNA analysis can be performed on total cellular RNA or poly(A)+ mRNA. Methods of RNA isolation are well known in the art. RNA is prepared using methods well known in the art, for example, using the TRIZOL® Reagent (Invitrogen, Carlsbad, Calif.) according to the manufacturer's recommended protocols.

### Analysis of Inhibition of Target Levels or Expression

[0264] Inhibition of levels or expression of a TTC39 nucleic acid can be assayed in a variety of ways known in the art. For example, target nucleic acid levels can be quantitated by, e.g., Southern blot analysis, Northern blot analysis, competitive polymerase chain reaction (PCR), or quantitative real-time PCR. RNA analysis can be performed on total cellular RNA or poly(A)+ mRNA. Methods of RNA isolation are well known in the art. Northern blot analysis is also routine in the art. Quantitative real-time PCR can be conveniently accomplished using the commercially available ABI PRISM® 7600, 7700, or 7900 Sequence Detection System, available from PE-Applied Biosystems, Foster City, Calif. and used according to manufacturer's instructions.

### Quantitative Real-Time PCR Analysis of Target RNA Levels

[0265] Quantitation of target RNA levels can be accomplished by quantitative real-time PCR using the ABI PRISMS 7600, 7700, or 7900 Sequence Detection System (PE-Applied Biosystems, Foster City, Calif.) according to manufacturer's instructions. Methods of quantitative real-time PCR are well known in the art.

[0266] Prior to real-time PCR, the isolated RNA is subjected to a reverse transcriptase (RT) reaction, which produces complementary DNA (cDNA) that is then used as the substrate for the real-time PCR amplification. The RT and real-time PCR reactions are performed sequentially in the same sample well. RT and real-time PCR reagents are obtained from Invitrogen (Carlsbad, Calif.). RT, real-time-PCR reactions are carried out by methods well known to those skilled in the art.

[0267] Gene (or RNA) target quantities obtained by real time PCR are normalized using either the expression level of a gene whose expression is constant, such as cyclophilin A or GAPDH, or by quantifying total RNA using RIBOGREEN® (Invitrogen, Inc. Carlsbad, Calif.). Cyclophilin A or GAPDH expression is quantified by real time PCR, by being run simultaneously with the target, multiplexing, or separately. Total RNA is quantified using RIBOGREEN® RNA quantification reagent (Invitrogen, Inc. Eugene, Oreg.). Methods of RNA quantification by RIBOGREEN® are taught in Jones, L. J., et al, (Analytical Biochemistry, 1998, 265, 368-374). A CYTOFLUOR® 4000 instrument (PE Applied Biosystems) is used to measure RIBOGREEN® fluorescence.

[0268] Probes and primers are designed to hybridize to a TTC39 nucleic acid. Methods for designing real-time PCR probes and primers are well known in the art, and can include the use of software such as PRIMER EXPRESS® Software (Applied Biosystems, Foster City, Calif.).

### Analysis of Protein Levels

[0269] Antisense inhibition of TTC39 nucleic acids can be assessed by measuring TTC39 protein levels. Protein levels of TTC39 can be evaluated or quantitated in a variety of ways well known in the art, such as immunoprecipitation, Western blot analysis (immunoblotting), enzyme-linked immunosorbent assay (ELISA), quantitative protein assays, protein activity assays (for example, caspase activity assays), immunohistochemistry, immunocytochemistry or fluorescence-activated cell sorting (FACS). Antibodies directed to a target can be identified and obtained from a variety of sources, such as the MSRS catalog of antibodies (Aerie Corporation, Birmingham, Mich.), or can be prepared via conventional monoclonal or polyclonal antibody generation methods well known in the art.

### In Vivo Testing of Antisense Compounds

[0270] Antisense compounds, for example, antisense oligonucleotides, are tested in animals to assess their ability to inhibit expression of TTC39 and produce phenotypic changes. Testing can be performed in normal animals, or in experimental disease models. For administration to animals, antisense oligonucleotides are formulated in a pharmaceutically acceptable diluent, such as phosphate-buffered saline. Administration includes parenteral routes of administration. Following a period of treatment with antisense oligonucleotides, RNA is isolated from tissue and changes in TTC39 nucleic acid expression are measured. Changes in TTC39 protein levels are also measured.

### Certain Indications

[0271] In certain embodiments, provided herein are methods of treating an individual comprising administering one or more pharmaceutical compositions as described herein. In certain embodiments, the individual has cardiovascular disease.

[0272] Although GWAS has implicated a number of genes in cardiovascular disease or associated genes with markers such as cholesterol levels, follow-up studies in our hands for a number of the implicated genes have not confirmed the association with cardiovascular disease or the markers. However, as shown in the examples below, compounds targeted to TTC39 as described herein have been shown to increase the levels of HDL, LDL receptor, apoA4 and apoA1 and decrease the level PCSK9.

[0273] Reverse cholesterol transport (RCT) is a multi-step process resulting in the net movement of cholesterol from peripheral tissues back to the liver via the plasma compartment (Duffy and Rader, Nat Rev Cardiol. 2009 6: 455-63). In the context of atherosclerosis, the removal of excess, proatherogenic cholesterol from an atherosclerotic plaque by RCT is fundamental in mitigating plaque progression and can potentially promote plaque regression. RCT at the plaque site is facilitated by ATP binding cassette (ABC)A1 cellular transporters on macrophages which transfer cholesterol from macrophages to nascent or lipid-poor HDL. The cholesterol is then transported to the liver by HDL where it is selectively removed by scavenger receptor class B Type 1 (SRB1). At the liver, the cholesterol can be converted into bile acid and secreted into the gall bladder or the cholesterol can be directly secreted into bile as biliary cholesterol. RCT is completed when the bile acid or biliary cholesterol is secreted into the intestinal lumen and lost in the feces. Accordingly, RCT is promoted by the interaction of lipid-free or lipid-poor apoA1, the primary protein component of HDL, with ATP binding cassette (ABC)A1 cellular transporters on macrophages.

[0274] Apolipoprotein A-IV (apoA4) controls intestinal fat absorption, and has anti-oxidant and anti-atherogenic properties. The apoA4 protein is secreted into the circulation on the surface of chylomicron particles.

[0275] Proprotein convertase subtilisin/kexin type 9 (PCSK9) is an enzyme which plays a major regulatory role in cholesterol homeostasis. PCSK9 binds to the low-density lipoprotein receptors (LDLR), inducing LDLR degradation. Reduced LDLR levels result in decreased metabolism of low-density lipoproteins, which could lead to hypercholesterolemia.

[0276] Accordingly, provided herein are methods for ameliorating a symptom associated with cardiovascular disease in a subject in need thereof. In certain embodiments, provided is a method for reducing the rate of onset of a symptom associated with cardiovascular disease. In certain embodiments, provided is a method for reducing the severity of a symptom associated with cardiovascular disease. In such embodiments, the methods comprise administering to an individual in need thereof a therapeutically effective amount of a compound targeted to a TTC39 nucleic acid. In certain embodiments, the cardiovascular disease is arteriosclerosis, atherosclerosis, coronary heart disease, heart failure, hypertension, dyslipidemia, hypercholesterolemia, acute coronary syndrome, type II diabetes, type II diabetes with dyslipidemia, hepatic steatosis, non-alcoholic steatohepatitis, non-alcoholic fatty liver disease, hypertriglyceridemia, hyperfattyacidemia, hyperlipidemia and/or metabolic syndrome.

[0277] In certain embodiments, administration of an antisense compound targeted to a TTC39 nucleic acid results in reduction of TTC39 expression by at least about 15, 20, 25, 30, 35, 40, 45, 50, 55, 60, 65, 70, 75, 80, 85, 90, 95 or 99%, or a range defined by any two of these values.

[0278] In certain embodiments, pharmaceutical compositions comprising an antisense compound targeted to TTC39 are used for the preparation of a medicament for treating a patient suffering or susceptible to cardiovascular disease.

[0279] In certain embodiments, the methods described herein include administering a compound comprising a modified oligonucleotide having a contiguous nucleobase portion as described herein complementary to a sequence recited in SEQ ID NO: 1, 15, 2 or 3.

### Administration

[0280] In certain embodiments, the compounds and compositions as described herein are administered parenterally.

[0281] In certain embodiments, parenteral administration is by infusion. Infusion can be chronic or continuous or short or intermittent. In certain embodiments, infused pharmaceutical agents are delivered with a pump.

[0282] In certain embodiments, parenteral administration is by injection. The injection can be delivered with a syringe or a pump. In certain embodiments, the injection is a bolus injection. In certain embodiments, the injection is administered directly to a tissue or organ.

### Certain Combination Therapies

[0283] In certain embodiments, a first agent comprising the modified oligonucleotide of the invention is co-administered with one or more secondary agents. In certain embodiments, such second agents are designed to treat the same cardiovascular disease as the first agent described herein. In certain embodiments, such second agents are designed to treat a different disease, disorder, or condition as the first agent described herein. In certain embodiments, such second agents are designed to treat an undesired side effect of one or more pharmaceutical compositions as described herein. In certain embodiments, second agents are co-administered with the first agent to treat an undesired effect of the first agent. In certain embodiments, second agents are co-administered with the first agent to produce a combinational effect. In certain embodiments, second agents are co-administered with the first agent to produce a synergistic effect.

[0284] In certain embodiments, a first agent and one or more second agents are administered at the same time. In certain embodiments, the first agent and one or more second agents are administered at different times. In certain embodiments, the first agent and one or more second agents are prepared together in a single pharmaceutical formulation. In certain embodiments, the first agent and one or more second agents are prepared separately.

[0285] In certain embodiments, second agents include, but are not limited to statins, ezetamibe, niacin, fibrates, beta blockers, antihypertensives, antithrombotics, inhibitors of TTC39 and inhibitors of PCSK9.

### EXAMPLES

### Non-Limiting Disclosure and Incorporation by Reference

[0286] While certain compounds, compositions and methods described herein have been described with specificity in accordance with certain embodiments, the following examples serve only to illustrate the compounds described herein and are not intended to limit the same. Each of the references recited in the present application is incorporated herein by reference in its entirety.

### Example 1

### Antisense Inhibition of Murine TTC39B in Mouse Primary Hepatocytes

[0287] Antisense oligonucleotides targeted to a TTC39B nucleic acid were tested for their effects on TTC39B mRNA in vitro. Cultured mouse primary hepatocytes at a density of 10,000 cells per well were transfected using cytofectin reagent with 100 nM antisense oligonucleotide. After a treatment period of approximately 24 hours, RNA was isolated from the cells and TTC39B mRNA levels were measured by quantitative real-time PCR. TTC39B mRNA levels were adjusted according to total RNA content, as measured by RIBOGREEN®. Results are presented as percent inhibition of TTC39B, relative to untreated control cells.

[0288] The chimeric antisense oligonucleotides in Tables 1 and 2 were designed as 5-10-5 MOE gapmers. The gapmers are 20 nucleotides in length, wherein the central gap segment is comprised of 10 2′-deoxynucleotides and is flanked on both sides (in the 5′ and 3′ directions) by wings comprising 5 nucleotides each. Each nucleotide in the 5′ wing segment and each nucleotide in the 3′ wing segment has a 2′-MOE modification. The internucleoside linkages throughout each gapmer are phosphorothioate (P═S) linkages. All cytosine residues throughout each gapmer are 5-methylcytosines. “Target start site” indicates the 5′-most nucleotide to which the gapmer is targeted. “Target stop site” indicates the 3′-most nucleotide to which the gapmer is targeted. Each gapmer listed in Table 1 is targeted to SEQ ID NO: 6 (GENBANK Accession No. NM_{—}027238.2) and each gapmer listed in Table 2 is targeted to SEQ ID NO: 10 (the complement of GENBANK Accession No. NT_{—}039260.7 truncated at nucleotides 22491001 to 22601000), SEQ ID NO: 11 (GENBANK Accession No. BY244623.1), SEQ ID NO: 12 (GENBANK Accession No. BY260936), SEQ ID NO: 13 (GENBANK Accession No. BM935568.1) or SEQ ID NO: 14 (GENBANK Accession No. BY728780.1).

[0289] ‘Mismatches’ indicate the number of nucleobases by which the murine oligonucleotide is mismatched with a human sequence. The designation “n/a” indicates that there was greater than 3 mismatches between the murine oligonucleotide and the human sequence. The greater the complementarity between the murine oligonucleotide and the human sequence, the more likely the murine oligonucleotide can cross-react with the human sequence. The murine oligonucleotides in Table 1 were compared to human mRNA sequence as set forth in GenBank Accession No. NM_{—}152574.1 (SEQ ID NO: 1). The murine oligonucleotides in Table 2 were compared to human genomic sequence as set forth in GenBank Accession No. NT_{—}008413.17, position 15158001 to 15300000 (SEQ ID NO: 15).

TABLE 1
Inhibition of murine TTC39B mRNA levels by chimeric antisense oligonucleotides having 5-10-
5 MOE wings and deoxy gap targeted to SEQ ID NO: 6

| | Target | Target | | | SEQ | |
|---|---|---|---|---|---|---|
| Oligo | Start | Stop | | % | ID | |
| ID | Site | Site | Sequence | inhibition | NO | Mismatches |
| 447098 | 3 | 22 | GGCTCTGGGTTCAGCCCAGC | 44 | 16 | 1 |
| 447099 | 41 | 60 | CCGCACACCCACAGGGAACT | 56 | 17 | n/a |
| 447100 | 84 | 103 | TCCACTCGGCTGCCCACGAG | 62 | 18 | 3 |
| 447101 | 123 | 142 | TCCAAGGCATCTTCAAAGAT | 36 | 19 | 3 |
| 447102 | 148 | 167 | GTCCGATGGAGATCTAGAGA | 84 | 20 | n/a |
| 447103 | 174 | 193 | ACAAAGTGAAAGCCGCTGGT | 64 | 21 | n/a |
| 447104 | 255 | 274 | TCCACCTTGGCTGATGAACC | 48 | 22 | n/a |
| 447105 | 406 | 425 | GACAGCCTGCAACACCACAA | 52 | 23 | 0 |
| 447106 | 441 | 460 | ATGCCATTCTGGATGTCCTG | 70 | 24 | 1 |
| 447107 | 476 | 495 | TTTGGCAGGTTTGTAAAGCG | 61 | 25 | 0 |
| 447108 | 555 | 574 | TCTTCACTCAGTTGTTCCAG | 49 | 26 | 1 |
| 447109 | 635 | 654 | TCATATTTTCATCCTGCACA | 41 | 27 | 0 |
| 447110 | 658 | 677 | GAGTCCACCTTTGATGAAGT | 69 | 28 | 0 |
| 447111 | 695 | 714 | GGCACTCTTTATATATTTGG | 71 | 29 | 2 |
| 447112 | 781 | 800 | CCCCGTTCCAAGCTTGACTC | 62 | 30 | n/a |
| 447113 | 798 | 817 | AGCATCAAATTAAAGGCCCC | 59 | 31 | 0 |
| 447114 | 825 | 844 | CGGATGATTCTTGCTGGTAA | 73 | 32 | 3 |
| 447115 | 857 | 876 | TGTTTCCAGAAAATCCAATA | 56 | 33 | 2 |
| 447116 | 891 | 910 | GCGCCTTCCCGGAGCTGCAG | 56 | 34 | n/a |
| 447117 | 1050 | 1069 | AGTATGAGGGAGCCATTTGG | 47 | 35 | n/a |
| 447118 | 1076 | 1095 | GCAGCTCGATTCGGGCATGA | 76 | 36 | 2 |
| 447119 | 1114 | 1133 | TCGAAATGTTTCTTGAGCCT | 65 | 37 | n/a |
| 447120 | 1182 | 1201 | ATCCACATTAATTCCCAGTA | 65 | 38 | 2 |
| 447121 | 1221 | 1240 | TAGTAATACGCCTGCATCCA | 53 | 39 | 1 |
| 447122 | 1263 | 1282 | GTTGCCTTGGACCATTTACT | 67 | 40 | 0 |
| 447123 | 1284 | 1303 | GCAGCTTTCAAGAACACATA | 47 | 41 | 1 |
| 447124 | 1305 | 1324 | TCTGGAAGCATGCTCAAAAT | 60 | 42 | 1 |
| 447125 | 1486 | 1505 | CATCATTTCCAGGGCTGGCA | 54 | 43 | 2 |
| 447126 | 1595 | 1614 | CAGTAAAGTCTTGATTCTGC | 58 | 44 | n/a |
| 447127 | 1679 | 1698 | GCTCAGCTTGCAAGGGCCGC | 65 | 45 | 1 |
| 447128 | 1712 | 1731 | GTTTTTCACTTTCCACAACG | 56 | 46 | 2 |
| 447129 | 1773 | 1792 | TTATACAAAAATGCCAACTC | 34 | 47 | 2 |
| 447130 | 1809 | 1828 | AGGACCTTGATGGCCTTGTC | 44 | 48 | 2 |
| 447131 | 1892 | 1911 | TCCAGAGATGAAGAGCTGCT | 60 | 49 | 2 |
| 447132 | 1920 | 1939 | GTTCCGGATCAGTCCGTGGA | 58 | 50 | n/a |
| 447133 | 2128 | 2147 | GGCAGAGTATAAGAATTTCT | 56 | 51 | n/a |
| 447134 | 2189 | 2208 | CTTTATTGTACCTGCCAGTC | 53 | 52 | n/a |
| 447135 | 2278 | 2297 | GCCAATCTAAAAATGGCTCA | 67 | 53 | n/a |
| 447136 | 2305 | 2324 | AAAATATCTCTGAAGTTTAA | 24 | 54 | 0 |
| 447137 | 2442 | 2461 | AGATACAAGTCCCTTCTGCC | 50 | 55 | n/a |
| 447138 | 2509 | 2528 | AATGCCACCACCTTCAACCA | 65 | 56 | n/a |
| 447139 | 2541 | 2560 | GAGTACATTCAAATACAGGA | 58 | 57 | n/a |
| 447140 | 2566 | 2585 | TGAATGCTATTATTGGATCT | 66 | 58 | n/a |
| 447141 | 2766 | 2785 | GCAGCCATGGCCCTGGGTCA | 40 | 59 | n/a |
| 447142 | 3073 | 3092 | GGTGGAGTCTGGCCCTCAGC | 66 | 60 | n/a |
| 447143 | 3582 | 3601 | GCCACCAGTGCCTGCTGAGC | 74 | 61 | n/a |
| 447144 | 3713 | 3732 | TATTTCTATAGCTCATGACA | 69 | 62 | n/a |
| 447145 | 3979 | 3998 | TACAGACCATGAGCTTTGAT | 61 | 63 | n/a |
| 447146 | 4121 | 4140 | GGACTGCCTGCCATGGGTGC | 69 | 64 | n/a |
| 447147 | 4434 | 4453 | ACAGTATCTTGAACATGACA | 46 | 65 | n/a |
| 447148 | 4467 | 4486 | TTCTTACAAACATCCTAAGA | 54 | 66 | n/a |
| 447149 | 4978 | 4997 | CCAGACAGACACTCAGACCA | 48 | 67 | n/a |
| 447150 | 5512 | 5531 | CCTGATAAATCACAAATGCT | 46 | 68 | n/a |
| 447151 | 5645 | 5664 | GGAGGTCCCCTGGCCACGGC | 65 | 69 | n/a |
| 447152 | 5795 | 5814 | GACTTTGAGATGGCACACAA | 60 | 70 | n/a |
| 447153 | 7078 | 7097 | GACTTTTAATTCAAAGTCCT | 58 | 71 | n/a |
| 447154 | 8738 | 8757 | CGTGTCATTTATTAAATAAC | 22 | 72 | n/a |

TABLE 2
Inhibition of murine TTC39B mRNA levels by chimeric antisense oligonucleotides having 5-10-
5 MOE wings and deoxy gap targeted to SEQ ID NO: 10, 11, 12, 13 or 14

| | Target | Target | Target | | | | |
|---|---|---|---|---|---|---|---|
| | SEQ ID | Start | Stop | | % | SEQ ID | |
| Oligo ID | NO. | Site | Site | Sequence | inhibition | NO | Mismatches |
| 447158 | 10 | 2428 | 2447 | GGTGCCCGGACCAGCCCGCT | 39 | 73 | n/a |
| 447159 | 10 | 41311 | 41330 | TGTCAGTGACAGTGGCAGCT | 71 | 74 | 2 |
| 447160 | 10 | 41463 | 41482 | AAAGAGGAGTCCTTCCTTAA | 63 | 75 | n/a |
| 447162 | 10 | 47080 | 47099 | AGCCTTGTTCACTGGGAAGA | 59 | 76 | n/a |
| 447163 | 10 | 47185 | 47204 | GCCAGCCAGGGCAGGCACTC | 50 | 77 | n/a |
| 447168 | 10 | 64649 | 64668 | ACTCAGTCATACTTTTGGCA | 35 | 78 | n/a |
| 447169 | 10 | 67007 | 67026 | GAGATCAGTTTCTGATGAAA | 67 | 79 | 3 |
| 447167 | 10 | 67256 | 67275 | GAATTATTTATTCTCACACC | 56 | 80 | n/a |
| 447170 | 10 | 73426 | 73445 | ATCATATTTTCATCCTGAAA | 35 | 81 | 0 |
| 447171 | 10 | 78856 | 78875 | CCTTACCAAATTAAAGGCCC | 23 | 82 | 0 |
| 447172 | 10 | 84173 | 84192 | GTTTCTTGAGCCTATAAGTC | 54 | 83 | n/a |
| 447173 | 10 | 84330 | 84349 | GCTTACCTTGGACCATTTAC | 59 | 84 | 2 |
| 447174 | 10 | 93108 | 93127 | TCCAGATCATTATGTTTACA | 50 | 85 | 0 |
| 447175 | 10 | 93165 | 93184 | TATGGAGAAGCAGATGGCCT | 56 | 86 | 0 |
| 447155 | 11 | 1 | 20 | TCCGGTGCGCACCCAGTACC | 23 | 87 | n/a |
| 447156 | 11 | 79 | 98 | GCCCATGCACGGGTGGAGGA | 16 | 88 | n/a |
| 447157 | 11 | 177 | 196 | TTCCAGCTCGGCTGCGCCAC | 21 | 89 | n/a |
| 447161 | 12 | 258 | 277 | GGAGATGTGTGTACGGCAGC | 14 | 90 | n/a |
| 447164 | 13 | 165 | 184 | TGTCCGATGGAGATTGTTAA | 0 | 91 | n/a |
| 447165 | 13 | 583 | 602 | CGGAGATCAGTTTCTTCACT | 50 | 92 | n/a |
| 447166 | 14 | 57 | 76 | CTGATGAACTTGATTTAGCC | 0 | 93 | n/a |

### Example 2

### Dose-Dependent Antisense Inhibition of Murine TTC39B in Mouse Primary Hepatocytes

[0290] Eighteen gapmers, exhibiting 65 percent or greater in vitro inhibition of murine TTC39B (Example 1, Tables 1-2), were further tested at various doses in murine primary hepatocytes. Cells were plated at a density of 10,000 cells per well and transfected using cytofectin reagent with 25 nM, 50 nM, 100 nM, and 200 nM concentrations of antisense oligonucleotide, as specified in Table 3. After a treatment period of approximately 16 hours, RNA was isolated from the cells and TTC39B mRNA levels were measured by quantitative real-time PCR. Murine primer probe set mTtc39b_LTS00287 (forward sequence: CATCTCTAGATCTCCATCGGACATG, incorporated herein as SEQ ID NO: 94; reverse sequence: TGTCTGGAGGTCCGTTTGGT, incorporated herein as SEQ ID NO: 95; probe sequence: CACCAGCGGCTTTCACTTTGTACCATG, incorporated herein as SEQ ID NO: 96) was used to measure mRNA levels. TTC39B mRNA levels were adjusted according to total RNA content, as measured by RIBOGREEN®. Results are presented as percent inhibition of TTC39B, relative to untreated control cells. As illustrated in Table 3, TTC39B mRNA levels were reduced in a dose-dependent manner in antisense oligonucleotide treated cells.

TABLE 3
Dose-dependent antisense inhibition of murine TTC39B mRNA
in mouse primary hepatocytes

| ISIS No. | 25 nM | 50 nM | 100 nM | 200 nM |
|---|---|---|---|---|
| 447106 | 41 | 55 | 78 | 87 |
| 447110 | 39 | 52 | 77 | 87 |
| 447111 | 30 | 60 | 77 | 87 |
| 447114 | 42 | 70 | 85 | 92 |
| 447118 | 49 | 65 | 74 | 82 |
| 447119 | 28 | 52 | 80 | 77 |
| 447122 | 35 | 61 | 78 | 88 |
| 447127 | 40 | 62 | 84 | 90 |
| 447135 | 35 | 52 | 66 | 76 |
| 447138 | 20 | 49 | 68 | 86 |
| 447140 | 29 | 55 | 77 | 80 |
| 447142 | 36 | 64 | 85 | 91 |
| 447143 | 36 | 71 | 79 | 91 |
| 447144 | 37 | 69 | 74 | 84 |
| 447146 | 44 | 55 | 78 | 89 |
| 447151 | 39 | 56 | 76 | 85 |
| 447159 | 41 | 60 | 76 | 85 |
| 447169 | 17 | 43 | 65 | 81 |

### Example 3

### Dose-Dependent Antisense Inhibition of Murine TTC39B in Mouse Primary Hepatocytes

[0291] Four gapmers, exhibiting significant dose-dependent inhibition of murine TTC39B (Example 2, Table 3), were further tested at various doses in murine primary hepatocytes. Cells were plated at a density of 10,000 cells per well and transfected using cytofectin reagent with 6.25 nM, 12.5 nM, 25 nM, 50 nM, 100 nM, and 200 nM concentrations of antisense oligonucleotide, as specified in Table 4. After a treatment period of approximately 16 hours, RNA was isolated from the cells and TTC39B mRNA levels were measured by quantitative real-time PCR. Murine primer probe set mTtc39b_LTS00287 was used to measure mRNA levels. TTC39B mRNA levels were adjusted according to total RNA content, as measured by RIBOGREEN®. Results are presented as percent inhibition of TTC39B, relative to untreated control cells. As illustrated in Table 4, TTC39B mRNA levels were reduced in a dose-dependent manner in antisense oligonucleotide treated cells.

TABLE 4
Dose-dependent antisense inhibition of murine TTC39B mRNA
in mouse primary hepatocytes

| | | | | | 100.0 | 200.0 |
|---|---|---|---|---|---|---|
| ISIS No. | 6.25 nM | 12.5 nM | 25.0 nM | 50.0 nM | nM | nM |
| 447118 | 0 | 24 | 45 | 66 | 77 | 81 |
| 447143 | 7 | 25 | 44 | 72 | 88 | 94 |
| 447114 | 6 | 5 | 34 | 71 | 90 | 93 |
| 447159 | 12 | 19 | 37 | 62 | 78 | 86 |

### Example 4

### In Vivo Antisense Inhibition of Murine TTC39B

[0292] Four gapmers from the dose-dependent in vitro inhibition study (Example 3) were administered in C57BL/6 mice to evaluate their tolerability and potency.

[0293] ISIS 447114 (CGGATGATTCTTGCTGGTAA, incorporated herein as SEQ ID NO: 32) is a chimeric antisense oligonucleotide designed as a 5-10-5 MOE gapmer targeting murine TTC39B (GENBANK Accession No. NM_{—}027238.2, incorporated herein as SEQ ID NO: 6; oligonucleotide target site starting at position 825). The gapmer is 20 nucleotides in length, wherein the central gap segment is comprised of 10 consecutive 2′-deoxynucleosides and is flanked on both sides (in the 5′ and 3′ directions) by wings comprising 5 nucleosides each. Each nucleoside in each wing segment has a 2′-MOE modification. The internucleoside linkages throughout the gapmer are phosphorothioate (P═S) internucleoside linkages. All cytosine residues throughout the gapmer are 5′ methylcytosines.

[0294] ISIS 447118 (GCAGCTCGATTCGGGCATGA, incorporated herein as SEQ ID NO: 36) is a chimeric antisense oligonucleotide designed as a 5-10-5 MOE gapmer targeting murine TTC39B (GENBANK Accession No. NM_{—}027238.2, incorporated herein as SEQ ID NO: 6; oligonucleotide target site starting at position 1076). The gapmer is 20 nucleotides in length, wherein the central gap segment is comprised of 10 consecutive 2′-deoxynucleosides and is flanked on both sides (in the 5′ and 3′ directions) by wings comprising 5 nucleosides each. Each nucleoside in each wing segment has a 2′-MOE modification. The internucleoside linkages throughout the gapmer are phosphorothioate (P═S) internucleoside linkages. All cytosine residues throughout the gapmer are 5′ methylcytosines.

[0295] ISIS 447143 (GCCACCAGTGCCTGCTGAGC, incorporated herein as SEQ ID NO: 61) is a chimeric antisense oligonucleotide designed as a 5-10-5 MOE gapmer targeting murine TTC39B (GENBANK Accession No. NM_{—}027238.2, incorporated herein as SEQ ID NO: 6; oligonucleotide target site starting at position 3582). The gapmer is 20 nucleotides in length, wherein the central gap segment is comprised of 10 consecutive 2′-deoxynucleosides and is flanked on both sides (in the 5′ and 3′ directions) by wings comprising 5 nucleosides each. Each nucleoside in each wing segment has a 2′-MOE modification. The internucleoside linkages throughout the gapmer are phosphorothioate (P═S) internucleoside linkages. All cytosine residues throughout the gapmer are 5′ methylcytosines.

[0296] ISIS 447144 (TATTTCTATAGCTCATGACA, incorporated herein as SEQ ID NO: 62) is a chimeric antisense oligonucleotide designed as a 5-10-5 MOE gapmer targeting murine TTC39B (GENBANK Accession No. NM_{—}027238.2, incorporated herein as SEQ ID NO: 6; oligonucleotide target site starting at position 3713). The gapmer is 20 nucleotides in length, wherein the central gap segment is comprised of 10 consecutive 2′-deoxynucleosides and is flanked on both sides (in the 5′ and 3′ directions) by wings comprising 5 nucleosides each. Each nucleoside in each wing segment has a 2′-MOE modification. The internucleoside linkages throughout the gapmer are phosphorothioate (P═S) internucleoside linkages. All cytosine residues throughout the gapmer are 5′ methylcytosines.

[0297] Eight week old male C57BL/6 mice were obtained from The Jackson Laboratory (Bar Harbor, Me.).

[0298] Treatment

[0299] Four groups of five mice each were injected twice a week with 25 mg/kg (totaling 50 mg/kg/week) of ISIS 447114, ISIS 447118, ISIS 447143, or ISIS 447144 for 6 weeks. A control group of five mice was injected with phosphate buffered saline (PBS) twice a week for 6 weeks. Plasma samples were obtained before the start of treatment, at week 3 and at week 6. At the end of the treatment period, mice were fasted for 4 hours before being euthanized. Plasma and tissue samples were obtained for further analysis.

[0300] RNA Analysis

[0301] RNA was extracted from liver tissue for real-time PCR analysis of TTC39B using murine primer probe set mTtc39b_LTS00287. As shown in Table 5, the antisense oligonucleotides achieved significant reduction of murine TTC39B over the PBS control. Results are presented as an average of the percent inhibition of TTC39B, relative to control.

TABLE 5
In vivo antisense inhibition of murine TTC39B mRNA in C57BL/6 mice

| ISIS No | % inhibition |
|---|---|
| 447114 | 49 |
| 447118 | 73 |
| 447143 | 85 |
| 447144 | 70 |

[0302] Effect of Antisense Inhibition of TTC39B on Proteins Involved in Reverse Cholesterol Transport

[0303] Reverse cholesterol transport is a multi-step process resulting in the net movement of cholesterol from peripheral tissues back to the liver via the plasma compartment (Duffy and Rader, Nat Rev Cardiol. 2009 6: 455-63). In the context of atherosclerosis, the removal of excess, proatherogenic cholesterol from an atherosclerotic plaque by RCT is fundamental in mitigating plaque progression and can potentially promote plaque regression. RCT at the plaque site is facilitated by ATP binding cassette (ABC)A1 cellular transporters on macrophages which transfer cholesterol from macrophages to nascent or lipid-poor HDL. The cholesterol is then transported to the liver by HDL where it is selectively removed by scavenger receptor class B Type 1 (SRB1). At the liver, the cholesterol can be converted into bile acid and secreted into the gall bladder or the cholesterol can be directly secreted into bile as biliary cholesterol. RCT is completed when the bile acid or biliary cholesterol is secreted into the intestinal lumen and lost in the feces. Accordingly, RCT is promoted by the interaction of lipid-free or lipid-poor apoA1, the primary protein component of HDL, with ATP binding cassette (ABC)A1 cellular transporters on macrophages.

[0304] The effect of inhibition of TTC39B in mice on these proteins of reverse cholesterol transport was studied. RNA levels of ABCA1 were measured using murine primer probe set RTS1204 (forward sequence GGACTTGGTAGGACGGAACCT, designated herein as SEQ ID NO: 97; reverse sequence ATCCTCATCCTCGTCATTCAAAG, designated herein as SEQ ID NO: 98; and probe sequence AGGCCCAGACCTGTAAAGGCGAAG, designated herein as SEQ ID NO: 99). RNA levels of apoA1 were measured using murine primer probe set RTS14737 (forward sequence ACTCTGGGTTCAACCGTTAGTCA, designated herein as SEQ ID NO: 100; reverse sequence TATCCCAGAAGTCCCGAGTCAA, designated herein as SEQ ID NO: 101; and probe sequence CTGCAGGAACGGCTGGGCCC, designated herein as SEQ ID NO: 102). RNA levels of SRB1 were measured using murine primer probe set mSRB-1 (forward sequence TGACAACGACACCGTGTCCT, designated herein as SEQ ID NO: 103; reverse sequence ATGCGACTTGTCAGGCTGG, designated herein as SEQ ID NO: 104; and probe sequence CGTGGAGAACCGCAGCCTCCATT, designated herein as SEQ ID NO: 105).

[0305] As presented in Table 6, inhibition of TTC39B by ISIS 447143 and ISIS 447144 led to an average increase in apoA1 mRNA levels. The average levels of ABCA1 and SRB1 were modestly decreased or unaffected by treatment by any of the ISIS oligonucleotides.

TABLE 6
Effect of antisense inhibition of murine TTC39B mRNA on reverse
cholesterol transport protein mRNA levels.

| ISIS No | apoA1 | abcA1 | srb1 |
|---|---|---|---|
| 447114 | −14 | −18 | −12 |
| 447118 | −23 | −2 | 0 |
| 447143 | +1 | −17 | 0 |
| 447144 | +50 | 0 | 0 |

[0306] The increase in apoA1 mRNA levels was further corroborated with average increases seen in APOA1 plasma protein levels. As presented in Table 7, there was an average increase of APOA1 by 61% over the PBS control at week 6.

TABLE 7
Effect of antisense inhibition on APOA1 plasma protein levels

| | | | | % change |
|---|---|---|---|---|
| | | | | over the |
| | Week 0 | Week 3 | Week 6 | baseline |
| PBS | +10 | +13 | +14 | +46 |
| ISIS 447114 | +9 | +12 | +22 | +122 |
| ISIS 447118 | +9 | +13 | +18 | +88 |
| ISIS 447143 | +10 | +15 | +20 | +108 |
| ISIS 447144 | +10 | +14 | +20 | +108 |

[0307] Effect of Antisense Inhibition of TTC39B on Proteins Involved in Cholesterol Homeostasis.

[0308] Proprotein convertase subtilisin/kexin type 9, also known as PCSK9, is an enzyme which plays a major regulatory role in cholesterol homeostasis. PCSK9 binds to the low-density lipoprotein receptors (LDLR), inducing LDLR degradation. Reduced LDLR levels result in decreased metabolism of low-density lipoproteins, which could lead to hypercholesterolemia.

[0309] The effect of inhibition of TTC39B in mice on cholesterol homeostasis was studied. PCSK9 mRNA levels were measured using the murine primer probe set mPCSK9 (forward sequence ACCGACTTCAACAGCGTGC, designated herein as SEQ ID NO: 106; reverse sequence GGCTGTCACACTTGCTCGC, designated herein as SEQ ID NO: 107, probe sequence AGGATGGGACACGCTTCCACAGACAX, wherein X is a fluorophore, designated herein as SEQ ID NO: 108). LDLR mRNA levels were measured using the murine primer probe set mLDLR (forward sequence GACCGCAGCGAGTACACCA, designated herein as SEQ ID NO: 109; reverse sequence TCACCTCCGTGTCGAGAGC, designated herein as SEQ ID NO: 110, probe sequence TCTGCTCCCCAACCTGAAGAATGTGGT, designated herein as SEQ ID NO: 111). The results are presented as percentage inhibition compared to the PBS control.

[0310] As presented in Table 8, treatment with ISIS oligonucleotides targeting TTC39B reduced PCSK9 mRNA levels. LDLR mRNA levels did not display any significant change. These findings suggest that antisense inhibition of TTC39B may have a significant effect in lowering cholesterol in patients with hypercholesterolemia.

TABLE 8
Percent inhibition PCSK9 and LDLR mRNA levels

| ISIS No. | PCSK9 | LDLR |
|---|---|---|
| 447114 | 24 | 2 |
| 447118 | 45 | 6 |
| 447143 | 65 | 34 |
| 447144 | 19 | 2 |

[0311] Effect of Antisense Inhibition of TTC39B on Lipids

[0312] Cellular cholesterol efflux is mediated by HDL; low levels of HDL cholesterol are a significant predictor of atherosclerotic cardiovascular events. Plasma levels of HDL and apolipoprotein A1 (apoA1) are inversely correlated with the risk of cardiovascular disease (Caveliar et al, Biochim Biophys Acta. 2006 1761: 655-66).

[0313] To investigate the effect of inhibition of TTC39B on triglycerides and cholesterol levels in the plasma, samples were collected on weeks 0, 3, and 6, and total plasma cholesterol, LDL cholesterol, HDL cholesterol, and triglycerides were analyzed on an Olympus AU400e Analyzer.

[0314] Inhibition of TTC39B levels resulted in significant increases of HDL cholesterol levels starting from week 4. The results are presented in Table 9 as an average expressed in mg/dL. Treatment with ISIS oligonucleotides caused increases in HDL cholesterol levels by an average of 103% over the levels taken before the start of treatment, and this was over 50% of the PBS control at week 6 (Table 10), suggesting that treatment with ISIS oligonucleotides can significantly alter HDL cholesterol levels.

TABLE 9
Effect of antisense inhibition on HDL cholesterol levels (mg/dL)

| | Week 0 | Week 3 | Week 6 |
|---|---|---|---|
| PBS | 44 | 47 | 63 |
| ISIS 447114 | 42 | 47 | 96 |
| ISIS 447118 | 45 | 50 | 100 |
| ISIS 447143 | 44 | 56 | 91 |
| ISIS 447144 | 46 | 53 | 90 |

TABLE 10
Effect of antisense inhibition on HDL cholesterol levels
(% change over baseline)

| | Week 3 | Week 6 |
|---|---|---|
| PBS | +8 | +52 |
| ISIS 447114 | +14 | +130 |
| ISIS 447118 | +15 | +89 |
| ISIS 447143 | +28 | +104 |
| ISIS 447144 | +14 | +88 |

[0315] The levels of total cholesterol increased as a result of increases in HDL cholesterol levels by an average of 44% over the PBS control at week 6 (Table 11). The percentage change over the baseline average of 72 mg/dL is also presented. The levels of LDL cholesterol and triglycerides did not change significantly with treatment (Tables 12 and 13).

TABLE 11
Effect of antisense inhibition on total cholesterol levels (mg/dL)

| | | | | % increase |
|---|---|---|---|---|
| | | | | over |
| | Week 0 | Week 3 | Week 6 | baseline |
| PBS | 72 | 69 | 82 | +15 |
| ISIS 447114 | 66 | 70 | 114 | +61 |
| ISIS 447118 | 71 | 77 | 97 | +37 |
| ISIS 447143 | 70 | 81 | 104 | +46 |
| ISIS 447144 | 75 | 81 | 107 | +37 |

TABLE 12
Effect of antisense inhibition on LDL cholesterol levels (mg/dL)

| | Week 0 | Week 3 | Week 6 |
|---|---|---|---|
| PBS | 13 | 12 | 14 |
| ISIS 447114 | 11 | 12 | 19 |
| ISIS 447118 | 14 | 13 | 15 |
| ISIS 447143 | 13 | 14 | 17 |
| ISIS 447144 | 14 | 14 | 18 |

TABLE 13
Effect of antisense inhibition on triglyceride levels (mg/dL)

| | Week 0 | Week 3 | Week 6 |
|---|---|---|---|
| PBS | 87 | 66 | 92 |
| ISIS 447114 | 107 | 66 | 113 |
| ISIS 447118 | 82 | 69 | 88 |
| ISIS 447143 | 95 | 92 | 95 |
| ISIS 447144 | 78 | 70 | 91 |

[0316] In general, wildtype lean mice do not develop cardiovascular disease and the largest portion of their cholesterol is found in HDL. Therefore, significantly raising the HDL levels in these mice is difficult. The studies herein show that antisense oligonucleotide inhibition of TTC39B promotes unexpectedly vigorous increases in the HDL cholesterol levels of the wildtype lean mice.

[0317] Accordingly, treatment with ISIS oligonucleotides targeting TTC39B would be beneficial for patients with cardiovascular disorders, such as dyslipidemia and hypercholesterolemia.

[0318] Effect of Antisense Inhibition of TTC39B on Glucose Levels

[0319] Plasma glucose values were determined using a Beckman Glucose Analyzer II (Beckman Coulter) by a glucose oxidase assay. As presented in Table 14, there was no significant change in glucose levels after treatment with ISIS oligonucleotides.

TABLE 14
Effect of antisense inhibition on glucose levels (mg/dL)

| | Week 0 | Week 3 | Week 6 |
|---|---|---|---|
| PBS | 266 | 258 | 262 |
| ISIS 447114 | 293 | 229 | 232 |
| ISIS 447118 | 242 | 271 | 238 |
| ISIS 447143 | 238 | 231 | 241 |
| ISIS 447144 | 222 | 239 | 235 |

[0320] Effect of antisense inhibition of TTC39B on free fatty acid levels Plasma levels of non-esterified fatty acids (NEFA) and 3-hydroxybutyric acid (3-HB), which are the end-products of fatty acid oxidation, were measured using an automated clinical chemistry analyzer (Olympus Clinical Analyzer). The results are presented in Tables 15 and 16, the average is expressed in mEq/L. Treatment with ISIS oligonucleotide resulted in an average increase in free fatty acid levels in the plasma by 78% over the PBS control at week 6. Levels of 3-HB were not significantly affected by treatment.

TABLE 15
Effect of antisense inhibition on NEFA levels

| | | | | % change |
|---|---|---|---|---|
| | | | | over the |
| | Week 0 | Week 3 | Week 6 | baseline |
| PBS | 0.50 | 0.43 | 0.83 | +33 |
| ISIS 447114 | 0.67 | 0.49 | 1.52 | +144 |
| ISIS 447118 | 0.67 | 0.51 | 1.18 | +90 |
| ISIS 447143 | 0.70 | 0.72 | 1.30 | +109 |
| ISIS 447144 | 0.57 | 0.63 | 1.25 | +101 |

TABLE 16
Effect of antisense inhibition on 3-HB levels

| | | | | % change |
|---|---|---|---|---|
| | | | | over the |
| | Week 0 | Week 3 | Week 6 | baseline |
| PBS | 253 | 191 | 351 | +122 |
| ISIS 447114 | 145 | 109 | 449 | +184 |
| ISIS 447118 | 158 | 111 | 406 | +157 |
| ISIS 447143 | 108 | 89 | 222 | +41 |
| ISIS 447144 | 124 | 122 | 398 | +152 |

[0321] Effect of Antisense Inhibition of TTC39B on Body and Organ Weights

[0322] Body weights of all the mice were measured weekly till the end of the treatment period. Organ weights were taken at the end of the treatment period when the mice were euthanized. The results are presented in Tables 17 and 18, and indicate that treatment with ISIS oligonucleotides did not cause any adverse changes in the health of the mice, as indicated by changes in weights.

TABLE 17
Weekly body weight measurements (g) during treatment

| | week 1 | week 2 | week 3 | week 4 | week 5 | week 6 |
|---|---|---|---|---|---|---|
| PBS | 23 | 24 | 25 | 25 | 26 | 27 |
| ISIS 447114 | 25 | 25 | 26 | 26 | 27 | 27 |
| ISIS 447118 | 24 | 25 | 26 | 26 | 27 | 27 |
| ISIS 447143 | 26 | 26 | 27 | 27 | 28 | 28 |
| ISIS 447144 | 25 | 26 | 26 | 27 | 27 | 28 |

TABLE 18
Organ weight measurements (g) after treatment

| | Liver | Kidney | Spleen |
|---|---|---|---|
| PBS | 1.2 | 0.3 | 0.08 |
| ISIS 447114 | 1.3 | 0.33 | 0.09 |
| ISIS 447118 | 1.4 | 0.32 | 0.08 |
| ISIS 447143 | 1.5 | 0.34 | 0.08 |
| ISIS 447144 | 1.3 | 0.34 | 0.08 |

[0323] Evaluation of Liver Function

[0324] To evaluate the impact of ISIS oligonucleotides on the hepatic function of the mice described above, plasma concentrations of transaminases were measured using an automated clinical chemistry analyzer (Olympus Clinical Analyzer). Measurements of alanine transaminase (ALT) and aspartate transaminase (AST) are expressed in IU/L. The results are presented in Tables 19 and 20 and indicate that the oligonucleotides were well tolerated.

TABLE 19
Effect of antisense oligonucleotide treatment on ALT levels (IU/L)

| | Week 0 | Week 3 | Week 6 |
|---|---|---|---|
| PBS | 44 | 29 | 36 |
| ISIS 447114 | 46 | 21 | 40 |
| ISIS 447118 | 29 | 39 | 50 |
| ISIS 447143 | 32 | 31 | 45 |
| ISIS 447144 | 28 | 21 | 69 |

TABLE 20
Effect of antisense oligonucleotide treatment on AST levels (IU/L)

| | Week 0 | Week 3 | Week 6 |
|---|---|---|---|
| PBS | 229 | 37 | 148 |
| ISIS 447114 | 83 | 29 | 93 |
| ISIS 447118 | 88 | 39 | 127 |
| ISIS 447143 | 50 | 31 | 73 |
| ISIS 447144 | 67 | 31 | 113 |

### Example 5

### Effect of Antisense Inhibition of Murine TTC39B in the LDLr^{-/-} Mice Model

[0325] ISIS 447118, which displayed high potency and tolerability in vivo (Example 4), was administered in the LDL receptor knockout mice model to evaluate its tolerability, potency and effect on hypercholesterolemia and atherosclerosis in this model.

[0326] The LDLr knockout mice model is a model for familial hypercholesterolemia developed by Ishibashi et al (J Clin Invest 1993; 92: 883-893). On a normal chow diet, the mice have an average total cholesterol of 250 mg/dL due to increases in LDL and VLDL cholesterol. This model is therefore highly susceptible to atherosclerosis (Ishibashi et al Proc Natl Acad Sci USA 1994; 91: 4431-4435).

[0327] Treatment

[0328] Four groups of five male mice each were injected with a total of 1.5, 5, 15, or 50 mg/kg/week of ISIS 447118 for 6 weeks. A group of five mice was injected with a total of 50 mg/kg/week of control oligonucleotide ISIS 141923 (CCTTCCCTGAAGGTTCCTCC, designated herein as SEQ ID NO: 112, which has no known murine target) for 6 weeks. A control group of five mice was injected with phosphate buffered saline (PBS) twice a week for 6 weeks. Plasma samples were obtained before the start of treatment, at week 3 and at week 6. At the end of the treatment period, the mice were euthanized. Plasma and tissue samples were obtained for further analysis.

[0329] Effect of Antisense Inhibition on Cholesterol and Triglyceride Levels

[0330] Cellular cholesterol efflux is mediated by HDL; low levels of HDL cholesterol are a significant predictor of atherosclerotic cardiovascular events.

[0331] To investigate the effect of inhibition of TTC39B on triglycerides and cholesterol levels in the plasma, samples were collected on weeks 0, 3, and 6, and total plasma cholesterol, LDL cholesterol, HDL cholesterol, and triglycerides were analyzed on an Olympus AU400e Analyzer.

[0332] Inhibition of TTC39B levels resulted in significant increases of HDL cholesterol levels on week 6 with all four doses. The results are presented in Table 21 as an average expressed in mg/dL. Treatment with the ISIS oligonucleotide at 50 mg/kg/wk caused increases in HDL cholesterol levels by an average of 58% over the levels taken before the start of treatment, and this was over 22% of the PBS control at week 6 (Table 22), suggesting that treatment with ISIS oligonucleotides can significantly increase HDL cholesterol levels.

TABLE 21
Effect of antisense inhibition on HDL cholesterol levels (mg/dL)

| | Dose | Week 0 | Week 3 | Week 6 |
|---|---|---|---|---|
| PBS | — | 76 | 85 | 103 |
| ISIS 141923 | 50 | 76 | 78 | 108 |
| ISIS 447118 | 1.5 | 75 | 71 | 101 |
| | 5 | 88 | 83 | 112 |
| | 15 | 84 | 82 | 122 |
| | 50 | 78 | 85 | 124 |

TABLE 22
Effect of antisense inhibition on HDL cholesterol levels
(% change over baseline)

| | | % increase on |
|---|---|---|
| | Dose | week 6 |
| PBS | | 36 |
| ISIS 141923 | 50 | 43 |
| ISIS 447118 | 1.5 | 36 |
| | 5 | 28 |
| | 15 | 45 |
| | 50 | 58 |

[0333] The levels of total cholesterol, LDL cholesterol and triglycerides are shown in Tables 23, 24 and 25, respectively. The increase in total cholesterol may be a result of the increase in HDL.

TABLE 23
Effect of antisense inhibition on total cholesterol levels (mg/dL)

| | Dose | Week 0 | Week 3 | Week 6 |
|---|---|---|---|---|
| PBS | | 222 | 216 | 229 |
| ISIS 141923 | 50 | 206 | 204 | 227 |
| ISIS 447118 | 1.5 | 227 | 217 | 247 |
| | 5 | 234 | 232 | 261 |
| | 15 | 239 | 249 | 294 |
| | 50 | 207 | 224 | 282 |

TABLE 24
Effect of antisense inhibition on LDL cholesterol levels (mg/dL)

| | Dose | Week 0 | Week 3 | Week 6 |
|---|---|---|---|---|
| PBS | | 113 | 103 | 117 |
| ISIS 141923 | 50 | 100 | 100 | 112 |
| ISIS 447118 | 1.5 | 115 | 116 | 131 |
| | 5 | 112 | 120 | 130 |
| | 15 | 122 | 133 | 158 |
| | 50 | 99 | 111 | 146 |

TABLE 25
Effect of antisense inhibition on triglyceride levels (mg/dL)

| | Dose | Week 0 | Week 3 | Week 6 |
|---|---|---|---|---|
| PBS | | 113 | 117 | 128 |
| ISIS 141923 | 50 | 97 | 116 | 143 |
| ISIS 447118 | 1.5 | 126 | 107 | 142 |
| | 5 | 118 | 122 | 149 |
| | 15 | 120 | 126 | 131 |
| | 50 | 98 | 96 | 115 |

[0334] The studies herein show that antisense oligonucleotide inhibition of TTC39B in LDLr knockout mice promotes unexpectedly vigorous increases in the HDL cholesterol levels.

[0335] Accordingly, treatment with ISIS oligonucleotides targeting TTC39B could be beneficial for patients with cardiovascular disorders, such as dyslipidemia, atherosclerosis and hypercholesterolemia.

[0336] PCR Microarray Analysis

[0337] Liver samples from the mice groups were analyzed using a commercial kit for PCR microarray analysis (SA Biosciences Corp., MD), according to the manufacturer's instructions. Genes involved in lipoprotein and cholesterol metabolism were compared with the PBS control. The results are presented in Table 26.

[0338] As presented in Table 26, antisense inhibition of TTC39B resulted in an increase in apoA4 mRNA, which controls intestinal fat absorption, and has anti-atherogenic properties (Duverger et al, Science 273 (5277): 966-8). PCSK9 mRNA was significantly decreased, similar to the observations in the C57BL/6 model (Example 4). Therefore, antisense inhibition of TTC39B resulted in significant changes in several genes involved in lipid and cholesterol metabolism. Hence treatment with ISIS oligonucleotides could be beneficial for individuals suffering from cardiovascular disorders such as dyslipidemia, atherosclerosis and hypercholesterolemia

TABLE 26
Fold increase/decrease relative to PBS group

| | | ISIS 141923 | 447118 | 447118 | 447118 | 447118 |
|---|---|---|---|---|---|---|
| Gene Name | Symbol | (50 mg/kg) | (1.5 mg/kg) | (5 mg/kg) | (15 mg/kg) | (50 mg/kg) |
| Apolipoprotein A-IV | ApoA4 | 0.87 | 1.26 | 1.38 | 1.76 | 2.7 |
| Low density | Ldlr | 1.36 | 1.43 | 1.28 | 1.79 | 2.87 |
| lipoprotein receptor | | | | | | |
| Oxysterol binding | Osbpl5 | 1.21 | 1.7 | 2.34 | 3.11 | 2.11 |
| protein-like 5 | | | | | | |
| Sterol O- | Soat2 | 0.95 | 1.05 | 0.88 | 1.36 | 1.79 |
| acyltransferase 2 | | | | | | |
| Stabilin 1 | Stab1 | 1.12 | 1.15 | 1.19 | 1.35 | 1.53 |
| Farnesyl diphosphate | Fdps | 1.21 | 1.03 | 0.84 | 0.8 | 0.66 |
| synthetase | | | | | | |
| Insulin induced gene 1 | Insig1 | 1.13 | 0.96 | 0.84 | 0.68 | 0.67 |
| Mevalonate | Mvd | 1.25 | 0.81 | 0.7 | 0.56 | 0.67 |
| (diphospho) | | | | | | |
| decarboxylase | | | | | | |
| Proprotein convertase | Pcsk9 | 1.09 | 0.83 | 0.66 | 0.4 | 0.23 |
| subtilisin/kexin type 9 | | | | | | |

[0339] It is expected that antisense oligonucleotides targeted to TTC39A and TTC39C will provide similar beneficial effects to those provided by oligonucleotides targeted to TTC39B, as tested in Examples 1-5 herein. Antisense oligonucleotides targeted to TTC39A and TTC39C are expected to behave similarly to antisense oligonucleotides targeted to TTC39B because TTC39A and TTC39C are isoforms of TTC39B with each TTC39 isoform having at least one tetratricopeptide repeat (TPR) motif consisting of two antiparallel α-helices. Antisense oligonucleotides targeted to TTC39A and TTC39C are therefore expected to increase HDL levels, increase LDLr levels, increase apoA1 levels and increase apoA4 levels while decreasing PCSK9 levels.

### Example 6

### Antisense Inhibition of Mouse Tetratricopeptide Repeat Domain 39A (TTC39A) in b.END Cells

[0340] Antisense oligonucleotides were designed targeting a TTC39A nucleic acid and were tested for their effects on TTC39A mRNA in vitro. Cultured b.END cells at a density of 4,000 cells per well were transfected using cytofectin reagent with 70 nM antisense oligonucleotide. After a treatment period of approximately 24 hours, RNA was isolated from the cells and TTC39A mRNA levels were measured by quantitative real-time PCR. Mouse primer probe set RTS3262 (forward sequence TGTGCGTCATGCTGTTGCT, designated herein as SEQ ID NO: 113; reverse sequence CCTCGATGTTGACATTCCCAGTA, designated herein as SEQ ID NO: 114; probe sequence TGTTATCACACCTTCCTCACCTTCGTGCTC, designated herein as SEQ ID NO: 115). TTC39A mRNA levels were adjusted according to total RNA content, as measured by RIBOGREEN®. Results are presented as percent inhibition of TTC39A, relative to untreated control cells.

[0341] The chimeric antisense oligonucleotides targeting TTC39A were designed as 5-10-5 MOE gapmers. The gapmers are 20 nucleotides in length, wherein the central gap segment is comprised of ten 2′-deoxynucleotides and is flanked on both sides (in the 5′ and 3′ directions) by wings comprising five nucleotides each. Each nucleotide in the 5′ wing segment and each nucleotide in the 3′ wing segment has a 2′-MOE modification. The internucleoside linkages throughout each gapmer are phosphorothioate (P═S) linkages. All cytosine residues throughout each gapmer are 5-methylcytosines. “Mouse Target start site” indicates the 5′-most nucleotide to which the gapmer is targeted in a mouse nucleic acid sequence.

[0342] Over a hundred chimeric antisense oligonucleotides were designed to target at least one of the following murine TTC39A sequences: a mRNA sequence, designated herein as SEQ ID NO: 116 (GENBANK Accession No. NM_{—}153392.2), a genomic sequence, designated herein as SEQ ID NO: 117 (GENBANK Accession No. NT_{—}039264.6 truncated from nucleotides 9527001 to 9571000), SEQ ID NO: 118 (GENBANK Accession No. BF182232.1), SEQ ID NO: 119 (GENBANK Accession No. BF540348.1), SEQ ID NO: 120 (GENBANK Accession No. BG861605.1), SEQ ID NO: 121 (GENBANK Accession No. BG862399.1), SEQ ID NO: 122 (GENBANK Accession No. BI082980.1), SEQ ID NO: 123 (GENBANK Accession No. BI147002.1), SEQ ID NO: 124 (the complement of GENBANK Accession No. BY024857.1), SEQ ID NO: 125 (GENBANK Accession No. CF915889.1), SEQ ID NO: 126 (GENBANK Accession No. NM_{—}001145948.1), SEQ ID NO: 127 (GENBANK Accession No. W89566.1) or SEQ ID NO: 128 (GENBANK Accession No. BX513784.1). Table 27 shows an exemplary selection of eleven chimeric antisense oligonucleotides targeting TTC39A that exhibited good inhibition of TTC39A.

[0343] The murine oligonucleotides of Table 27 may also be cross-reactive with human mRNA sequence. ‘Mismatches’ indicate the number of nucleobases by which the murine oligonucleotide is mismatched with a human mRNA sequence. The greater the complementarity between the murine oligonucleotide and the human mRNA sequence, the more likely the murine oligonucleotide can cross-react with the human sequence. The murine oligonucleotides in Table 27 were compared to SEQ ID NO: 129 (GenBank Accession No. NM_{—}001144832.1). “Human Target start site” indicates the 5′-most nucleotide to which the antisense oligonucleotide is targeted in the human sequence.

TABLE 27
Inhibition of murine TTC39A mRNA levels by chimeric antisense oligonucleotides having 5-10-
5 MOE wings and deoxy gap targeted to various TTC39A sequences

| Mouse | Mouse | | | | Human | | SEQ |
|---|---|---|---|---|---|---|---|
| Start | Target | | | % | start | | ID |
| Site | SEQ ID | ISIS No | Sequence | inhibition | Site | Mismatches | NO |
| 132 | 116 | 474351 | TGCACTGGTCCAGGGCCTCA | 94 | 145 | 0 | 130 |
| 1273 | 116 | 474369 | CGCCTGGACTTCCGGATAGC | 96 | 1286 | 2 | 131 |
| 2175 | 116 | 474382 | GCATGTAGAGAACTTCCAGG | 95 | n/a | n/a | 132 |
| 12879 | 117 | 474498 | CACCTGGGTTTGAGGTAGCT | 95 | n/a | n/a | 133 |
| 29919 | 117 | 474366 | TCCTTGCTCAGCAGGTCGGC | 93 | 1100 | 1 | 134 |
| 41381 | 117 | 474382 | GCATGTAGAGAACTTCCAGG | 95 | n/a | n/a | 132 |
| 319 | 125 | 474474 | TCGGTGCCTCTGACACAGCG | 97 | 348 | 2 | 135 |
| 25705 | 117 | 474437 | GCCTCAGAATCCTGGTGGGA | 94 | 685 | 3 | 136 |
| 4167 | 117 | 474497 | AGTTGGGACCCAGAAGGCCT | 94 | n/a | n/a | 137 |
| 518 | 116 | 474435 | CCGCACTTTGATGCCGCCCT | 94 | 531 | 3 | 138 |
| 1687 | 116 | 474452 | TCCATGGAGTAGTTCTTGTA | 92 | 1700 | 1 | 139 |

### Example 7

### Dose-Dependent Antisense Inhibition of Murine TTC39A in b.END Cells

[0344] Eleven antisense oligonucleotides, exhibiting 90 percent or greater in vitro inhibition of murine TTC39A (Example 6, Table 27), were further tested at various doses in b.END cells. Cells were plated at a density of 3,500 cells per well and transfected using cytofectin reagent with 4.375 nM, 8.75 nM, 17.5 nM, 35 nM, 70 nM, and 140 nM concentrations of antisense oligonucleotide, as specified in Table 28. After a treatment period of approximately 16 hours, RNA was isolated from the cells and TTC39A mRNA levels were measured by quantitative real-time PCR. Murine primer probe set RTS3262 was used to measure mRNA levels. TTC39A mRNA levels were adjusted according to total RNA content, as measured by RIBOGREEN®. Results are presented as percent inhibition of TTC39A, relative to untreated control cells. As illustrated in Table 28, TTC39A mRNA levels were reduced in a dose-dependent manner in antisense oligonucleotide treated cells.

TABLE 28
Dose-dependent antisense inhibition of murine TTC39A
mRNA in b.END cells

| ISIS | 4.375 | | 17.5 | | | 140.0 | IC₅₀ |
|---|---|---|---|---|---|---|---|
| No | nM | 8.75 nM | nM | 35.0 nM | 70.0 nM | nM | (nM) |
| 474369 | 0 | 14 | 22 | 48 | 62 | 82 | 44 |
| 474382 | 0 | 10 | 24 | 41 | 68 | 80 | 42 |
| 474351 | 6 | 0 | 8 | 48 | 66 | 84 | 44 |
| 474366 | 0 | 0 | 23 | 45 | 64 | 80 | 43 |
| 474380 | 10 | 0 | 4 | 37 | 46 | 73 | 76 |
| 474474 | 0 | 5 | 27 | 56 | 72 | 87 | 33 |
| 474498 | 0 | 6 | 33 | 55 | 64 | 80 | 35 |
| 474437 | 5 | 6 | 26 | 36 | 62 | 82 | 49 |
| 474497 | 8 | 5 | 21 | 29 | 53 | 77 | 72 |
| 474435 | 0 | 2 | 11 | 8 | 52 | 76 | 67 |
| 474452 | 0 | 9 | 36 | 46 | 61 | 86 | 41 |

### Example 8

### Antisense Inhibition of Mouse Tetratricopeptide Repeat Domain 39C (TTC39C) in Mouse Primary Hepatocytes

[0345] Antisense oligonucleotides were designed targeting a TTC39C nucleic acid and were tested for their effects on TTC39C mRNA in vitro. Cultured mouse primary hepatocytes at a density of 30,000 cells per well were transfected by electroporation with 8,000 nM antisense oligonucleotide. After a treatment period of approximately 24 hours, RNA was isolated from the cells and TTC39C mRNA levels were measured by quantitative real-time PCR. Mouse primer probe set RTS3266 (forward sequence AAGAAGGCTGAGCGATTTCG, designated herein as SEQ ID NO: 140; reverse sequence TCCACAAGTAGAGCACTTCAATGG, designated herein as SEQ ID NO: 141; probe sequence AAGCAAACCCCAACCAGAGCGCTG, designated herein as SEQ ID NO: 142). TTC39C mRNA levels were adjusted according to total RNA content, as measured by RIBOGREEN®. Results are presented as percent inhibition of TTC39C, relative to untreated control cells.

[0346] The chimeric antisense oligonucleotides targeting TTC39C were designed as 5-10-5 MOE gapmers. The gapmers are 20 nucleotides in length, wherein the central gap segment is comprised of ten 2′-deoxynucleotides and is flanked on both sides (in the 5′ and 3′ directions) by wings comprising five nucleotides each. Each nucleotide in the 5′ wing segment and each nucleotide in the 3′ wing segment has a 2′-MOE modification. The internucleoside linkages throughout each gapmer are phosphorothioate (P═S) linkages. All cytosine residues throughout each gapmer are 5-methylcytosines. “Mouse Target start site” indicates the 5′-most nucleotide to which the gapmer is targeted in the mouse gene sequence.

[0347] Over one hundred antisense oligonucleotides were designed to target at least one of the following murine TTC39C sequences: a mRNA sequence, designated herein as SEQ ID NO: 143 (GENBANK Accession No. NM_{—}028341.4), a genomic sequence, designated herein as SEQ ID NO: 144 (GENBANK Accession No. NT_{—}039674.7 truncated from nucleotides 9799001 to 9898000), SEQ ID NO: 145 (GENBANK Accession No. AK077971.1) or SEQ ID NO: 146 (GENBANK Accession No. AA511505.1). Table 29 shows an exemplary selection of thirty chimeric antisense oligonucleotides targeting TTC39C that exhibited good inhibition of TTC39C.

[0348] The murine oligonucleotides of Table 29 may also be cross-reactive with human mRNA sequence. ‘Mismatches’ indicate the number of nucleobases by which the murine oligonucleotide is mismatched with a human mRNA sequence. The greater the complementarity between the murine oligonucleotide and the human mRNA sequence, the more likely the murine oligonucleotide can cross-react with the human sequence. The murine oligonucleotides in Table 29 were compared to a human TTC39C sequence as shown in SEQ ID NO: 147 (GenBank Accession No. NM_{—}001135993.1). “Human Target start site” indicates the 5′-most nucleotide to which the antisense oligonucleotide is targeted in the human mRNA sequence.

TABLE 29
Inhibition of murine TTC39C mRNA levels by chimeric antisense oligonucleotides having 5-10-
5 MOE wings and deoxy gap targeted to various TTC39C sequences

| | Mouse | | | | | | |
|---|---|---|---|---|---|---|---|
| Mouse | Target | | | | Human | | SEQ |
| Start | SEQ | | | % | Start | | ID |
| Site | ID | ISIS No | Sequence | inhibition | Site | Mismatches | NO |
| 446 | 143 | 474592 | GAAGCATATTGATGCCAGCC | 93 | 554 | 3 | 148 |
| 465 | 143 | 474515 | TCCCTGAAGCCGTTGTTGAG | 96 | 573 | 0 | 149 |
| 509 | 143 | 474516 | TTAGTGGACTATGATTTCTG | 94 | 617 | 1 | 150 |
| 563 | 143 | 474517 | CCTCGAATGTCATCATGGCG | 98 | 671 | 2 | 151 |
| 592 | 143 | 474595 | GTCATCGCACGCCAACTGCA | 97 | 700 | 2 | 152 |
| 603 | 143 | 474518 | GTAGTCTTTAAGTCATCGCA | 96 | 711 | 3 | 153 |
| 641 | 143 | 474596 | CGATTACACCAGCCTCTTCA | 93 | 749 | 2 | 154 |
| 802 | 143 | 474598 | CCCACCTTTTATGTAGGCCG | 94 | n/a | n/a | 155 |
| 820 | 143 | 474521 | GGCTTTCCTAAGGATCCACC | 97 | 928 | 0 | 156 |
| 857 | 143 | 474599 | CGTTGATGTCCACATAGCAC | 92 | 965 | 3 | 157 |
| 902 | 143 | 474600 | CCAAGGGCTCTTCCGTCAGC | 90 | n/a | n/a | 158 |
| 949 | 143 | 474523 | GGTCACCCCTTCGGCCACAA | 98 | 1057 | 3 | 159 |
| 998 | 143 | 474601 | GGCCATATCCAAAGCTCACA | 91 | 1106 | 1 | 160 |
| 1202 | 143 | 474604 | TGTCACTGCCGTCCAAAGCA | 97 | 1310 | 3 | 161 |
| 1422 | 143 | 474607 | TCAATCATGCTGCACCAGCC | 98 | 1530 | 2 | 162 |
| 1496 | 143 | 474609 | CGTAGTAGCACTGGGACCAC | 95 | 1604 | 2 | 163 |
| 1550 | 143 | 474532 | GTTGTGCCCCATCCACATCA | 99 | 1658 | 2 | 164 |
| 1560 | 143 | 474610 | TTAAGAACAAGTTGTGCCCC | 90 | n/a | n/a | 165 |
| 1761 | 143 | 474535 | TCCACTTCATGGCAAGCTTG | 96 | 1869 | 0 | 166 |
| 1788 | 143 | 474613 | TGCTTTAATCCAACGACAGA | 90 | 1896 | 2 | 167 |
| 1894 | 143 | 474615 | GTACGAGTTACTCTGCCGAC | 96 | n/a | n/a | 168 |
| 1914 | 143 | 474538 | TAGCACGCATATGGCGGGAC | 96 | n/a | n/a | 169 |
| 2064 | 143 | 474617 | AGTTCCCTTAGGGAGGCCAG | 94 | 2172 | 3 | 170 |
| 2091 | 143 | 474540 | CCACTGGGAGTTTATCACTG | 98 | n/a | n/a | 171 |
| 2891 | 144 | 474543 | CCAGGTGGCTTTGGCTTGGG | 98 | n/a | n/a | 172 |
| 89499 | 144 | 474589 | TCCGAAATCGCTCAGCCTGC | 100 | 1745 | 3 | 173 |
| 98430 | 144 | 474654 | TCAGCTACAGAACGCAGGGT | n.d. | n/a | n/a | 174 |
| 49280 | 144 | 474662 | GGATTTCCGGGCATCAACCT | 95 | 796 | 3 | 175 |
| 84446 | 144 | 474666 | CAATCATGCTGCACCAGCCT | 95 | 1529 | 3 | 176 |
| 79 | 146 | 474629 | GATCACTGCCGTCCAAAGCA | 93 | 1310 | 3 | 177 |

### Example 9

### Dose-Dependent Antisense Inhibition of Murine TTC39C in Mouse Primary Hepatocytes

[0349] Thirty antisense oligonucleotides were selected from the study described in Example 8 and further tested at various doses in mouse primary hepatocytes. Cells were plated at a density of 30,000 cells per well and transfected using electroporation with 500 nM, 1,000 nM, 2,000 nM, 4,000 nM, and 8,000 nM concentrations of antisense oligonucleotide, as specified in Table 30. After a treatment period of approximately 16 hours, RNA was isolated from the cells and TTC39C mRNA levels were measured by quantitative real-time PCR. Murine primer probe set RTS3266 was used to measure mRNA levels. TTC39C mRNA levels were adjusted according to total RNA content, as measured by RIBOGREEN®. Results are presented as percent inhibition of TTC39C, relative to untreated control cells. As illustrated in Table 30, TTC39C mRNA levels were reduced in a dose-dependent manner in antisense oligonucleotide treated cells. ‘n/a’ indicates that the IC₅₀ for the particular antisense oligonucleotide could not be calculated in that dose range.

TABLE 30
Dose-dependent antisense inhibition of murine TTC39C mRNA
in mouse primary hepatocytes

| ISIS | 500.0 | | 2000.0 | | 8000.0 | IC₅₀ |
|---|---|---|---|---|---|---|
| No | nM | 1000.0 nM | nM | 4000.0 nM | nM | (μM) |
| 474515 | 56 | 62 | 79 | 91 | 94 | n/a |
| 474516 | 34 | 61 | 71 | 88 | 95 | 0.8 |
| 474517 | 60 | 67 | 89 | 95 | 97 | n/a |
| 474518 | 61 | 73 | 90 | 94 | 96 | n/a |
| 474521 | 46 | 63 | 84 | 92 | 97 | 0.5 |
| 474523 | 72 | 80 | 94 | 96 | 97 | n/a |
| 474532 | 51 | 64 | 84 | 94 | 97 | 0.4 |
| 474535 | 18 | 35 | 61 | 83 | 93 | 1.5 |
| 474538 | 51 | 58 | 82 | 88 | 92 | 0.4 |
| 474540 | 43 | 65 | 81 | 92 | 97 | 0.5 |
| 474543 | 77 | 88 | 88 | 88 | 94 | n/a |
| 474589 | 95 | 96 | 97 | 99 | 100 | n/a |
| 474592 | 24 | 45 | 71 | 84 | 92 | 1.2 |
| 474595 | 80 | 87 | 95 | 98 | 98 | n/a |
| 474596 | 47 | 65 | 62 | 90 | 96 | 0.6 |
| 474598 | 40 | 37 | 60 | 83 | 94 | 1.1 |
| 474599 | 36 | 59 | 60 | 84 | 92 | 0.9 |
| 474600 | 47 | 57 | 66 | 86 | 89 | 0.6 |
| 474601 | 36 | 49 | 65 | 87 | 92 | 1.0 |
| 474604 | 43 | 70 | 84 | 88 | 96 | 0.5 |
| 474607 | 40 | 65 | 85 | 92 | 94 | 0.5 |
| 474609 | 48 | 56 | 71 | 90 | 97 | 0.6 |
| 474610 | 10 | 28 | 38 | 65 | 71 | 2.8 |
| 474613 | 30 | 33 | 43 | 65 | 74 | 2.1 |
| 474615 | 33 | 43 | 82 | 92 | 98 | 0.9 |
| 474617 | 43 | 45 | 80 | 86 | 94 | 0.8 |
| 474629 | 16 | 28 | 42 | 48 | 66 | 3.6 |
| 474654 | 11 | 14 | 38 | 60 | 74 | 3.1 |
| 474662 | 28 | 35 | 65 | 88 | 94 | 1.3 |
| 474666 | 35 | 54 | 79 | 92 | 95 | 0.8 |

1. A method of reducing a tetratricopeptide repeat domain 39 isoform expression in an animal comprising administering to the animal a compound comprising a modified oligonucleotide 12 to 30 linked nucleosides in length targeted to the tetratricopeptide repeat domain 39 isoform, wherein expression of the tetratricopeptide repeat domain 39 is reduced in the animal.

2. A method of increasing HDL level and/or decreasing PCSK9 level in an animal comprising administering to the animal a compound comprising a modified oligonucleotide 12 to 30 linked nucleosides in length targeted to a tetratricopeptide repeat domain 39 isoform, wherein the modified oligonucleotide reduces the tetratricopeptide repeat domain 39 isoform expression in the animal, thereby increasing the HDL level in the animal.

3. (canceled)

4. A method for treating an animal with cardiovascular disease comprising
a. identifying said animal with cardiovascular disease,
b. administering to said animal a therapeutically effective amount of a compound comprising a modified oligonucleotide 12 to 30 linked nucleosides in length targeted to a tetratricopeptide repeat domain 39 isoform,
wherein said animal with cardiovascular disease is treated.

5. The method of claim 1, wherein the tetratricopeptide repeat domain 39 isoform is isoform A, B or C.

6. The method of claim 5, wherein the tetratricopeptide repeat domain 39A has the sequence shown in SEQ ID NO: 2, wherein the tetratricopeptide repeat domain 39B has the sequence shown in SEQ ID NO: 1 and wherein the tetratricopeptide repeat domain 39C has the sequence shown in SEQ ID NO: 3.

7.-8. (canceled)

9. A method of reducing tetratricopeptide repeat domain 39B expression, increasing HDL levels and/or decreasing PCSK9 levels comprising administering to an animal a compound comprising a modified oligonucleotide consisting of 12 to 30 linked nucleosides and having a nucleobase sequence at least 90% complementary to SEQ ID NO: 1 as measured over the entirety of said modified oligonucleotide, wherein expression of tetratricopeptide repeat domain 39B is reduced.

10.-14. (canceled)

15. The method of claim 4, wherein the therapeutically effective amount of the compound administered to the animal increases HDL and/or decreases PCSK9 in the animal.

16. (canceled)

17. The method of claim 1, wherein the modified oligonucleotide has a nucleobase sequence comprising at least 8 contiguous nucleobases of the nucleobase sequence recited in SEQ ID NO: 1, 2, or 3.

18. The method of claim 1, wherein the animal is a human.

19. The method of claim 1, wherein the compound is a first agent and further comprising administering a second agent.

20. The method of claim 19, wherein the first agent and the second agent are co-administered.

21. The method of claim 1, wherein administration comprises parenteral administration.

22. The method of claim 1, wherein the compound consists of a single-stranded modified oligonucleotide.

23. The method of claim 1, wherein the nucleobase sequence of the modified oligonucleotide is at least 95% or is 100% complementary to SEQ ID NO: 1, 2 or 3 as measured over the entirety of said modified oligonucleotide.

24. (canceled)

25. The method of claim 1, wherein at least one internucleoside linkage of said modified oligonucleotide is a modified internucleoside linkage, wherein at least one nucleoside of said modified oligonucleotide comprises a modified sugar and/or wherein at least one nucleoside of said modified oligonucleotide comprises a modified nucleobase.

26. The method of claim 25, wherein each internucleoside linkage is a phosphorothioate internucleoside linkage, wherein the modified nucleobase is a 5-methylcytosine, wherein at least one modified sugar is a bicyclic sugar and/or wherein at least one modified sugar comprises a 2′-O-methoxyethyl, methyl(methyleneoxy) (4′-CH(CH₃)—O-2′) BNA or a 4′-(CH₂)ₙ—O-2′ bridge, wherein n is 1 or 2.

27.-31. (canceled)

32. The method of claim 1, wherein the modified oligonucleotide comprises:
a. a gap segment consisting of linked deoxynucleosides;
b. a 5′ wing segment consisting of linked nucleosides;
c. a 3′ wing segment consisting of linked nucleosides;
wherein the gap segment is positioned between the 5′ wing segment and the 3′ wing segment and wherein each nucleoside of each wing segment comprises a modified sugar.

33. (canceled)

34. The method of claim 1, wherein the modified oligonucleotide consists of 20 linked nucleosides.

35. The method of claim 1, wherein the modified oligonucleotide comprises:
a. a gap segment consisting of ten linked deoxynucleosides;
b. a 5′ wing segment consisting of five linked nucleosides;
c. a 3′ wing segment consisting of five linked nucleosides;
wherein the gap segment is positioned between the 5′ wing segment and the 3′ wing segment, wherein each nucleoside of each wing segment comprises a 2′-O-methoxyethyl sugar, wherein each internucleoside linkage of said modified oligonucleotide is a phosphorothioate linkage, wherein each cytosine in said modified oligonucleotide is a 5′-methylcytosine and wherein said reduction of tetratricopeptide repeat domain 39B expression increases HDL in the animal.

36.-37. (canceled)

38. The method of claim 4, wherein the cardiovascular disease is arteriosclerosis, atherosclerosis, coronary heart disease, heart failure, hypertension, dyslipidemia, hypercholesterolemia, acute coronary syndrome, type II diabetes, type II diabetes with dyslipidemia, hepatic steatosis, non-alcoholic steatohepatitis, non-alcoholic fatty liver disease, hypertriglyceridemia, hyperfattyacidemia, hyperlipidemia and metabolic syndrome.

39.-41. (canceled)

The application's sequence listing, which the Patent Office published only in electronic form, follows.

SEQUENCE LISTING (177 sequences)

SEQ ID NO: 1 - DNA, 2428 bp, Homo sapiens
agggagcgccgggccgtccccttttgccctcctttgcgctgggctgagcccagagccgagagcaggagtcggctctgagttccctgcttggtttttgggtggcagcagccagaggaggaatatggcgctcttaggcagccgagcggagctggaagcggacgaggacgttttcgaagatgccttggaaaccatctcaatatcttctcactcagatatggcaacaagcagccttcactttgcatcatgtgatacacaacaggcgcccagacagcgcggagcgtctactgtcagcagttcatcatcaaccaaggtggatctcaagagtggcctcgaagaatgtgctgtggcattgaacttatttctaagcaacaaatttacagacgccttagaattgcttcgcccctgggctaaggagagtatgtaccatgccttgggctacagtaccattgtggtgttgcaggctgtcctgaccttcgagcaacaggacatccagaacggcatttctgccatgaaggacgctttacaaacctgccaaaaatacaggaaaaaatacacagttgtagaatctttctcaagtcttctttctagaggatccctggagcaactgagtgaagaggaaatgcatgctgaaatctgttatgccgagtgtctcctacagaaagctgcactcacgtttgtgcaggatgaaaatatgatcaacttcatcaaaggtggactcaaaattagaacaagttaccaaatatataaagaatgtctttctatcctgcatgaaattcagaagaacaaacttcagcaggaattcttctatgagtttgaagggggtgtcaagcttggcagtggggcctttaatttgatgctgtcccttttaccagcaaggattatcagactactagaatttattggattttctgggaatagggagttgggcctcctgcagttacgtgaaggtgcttcaggaaggagcatgaggtctgcactgtgctgcttaaccatcttagcttttcatacttacatctccctaatacttggtacaggagaagtgaatgttgcggaagcagagcgtctcctggcacccttcctccagcagtttccaaatggctcactcgtgttgttttatcatgcccgaatagagttgctgaaagggaatcttgaagaggcacaagaagtatttcaaaaatgcgtttcagttcaagaagaatggaaacagtttcaccatctctgctactgggagctaatgtggattaatgttttccaacaaaactggatgcaggcatattactattcagatctgctttgcaaagagagtaaatggtccaaggcaacttatgtgttcttgaaagcagcaattttgagtatgcttccagaggaggatgtagtagcaacgaatgagaatgtggtaactttattcagacaggtggacagcttgaagcagagaattgccgggaaatctatccctactgagaagtttgctgtgaggaaggctcggcgttactccgcctccttacctgcacctgtgaagctcatcttacctgccctggaaatgatgtatgtctggaatggtttttcaatagtgagcaaaagaaaagacctttctgaaaatctgttagtaactgttgaaaaagctgaggcagctttacaaagtcaaaattttaacagcttctctgtggatgatgagtgcttagtgaagttacttaaaggatgttgcctcaagaacttacagcggcccttgcaagctgaactatgttacaatcatgttgtggaaagtgaaaagctactgaagtatgaccactacctagtgccgttcactctatttgaattggcatctttgtataaaagccagggggaaattgacaaggccataaagttcctagaaactgcaaggaacaactacaaagattactccctggagtccagactacacttcagaattcaggcagctcttcacctctggagaaaaccttcctcagattgatcagaacttgaaggatggaatttttccccaattagcatcggcatctgctatagattcaaccttatattaaagtggaaaaatgatcttgtgaataagagacaaaaaaacagtttttttggtcaatattttctatcatctgagagatttactgttggtctacataattttttttcctatggaatggcattctatattatctagaaaattcttatattttgcctcccccaaaagaatttcatattatttgaattagggggcgaagaagtcttttgaaagacttgcagatgtaatagtctaattagattatttatttttttaatgtgaaaattaatattgtttagcaaatagcttacaagttgagccaattttggatttgttgggtagttaaacttcagagatattttgttgcctgtatttaaatttcagaagataaataaatatcattgcatttaaaat

SEQ ID NO: 2 - DNA, 2733 bp, Homo sapiens
gtagcctccacggccgccgccgccgccgcgaggggccgcccgcggccccgtccgagcccggcccgcgcccatggcctttctgaccacctggaaggaggcggcctccgggaaaagcgaccgcaggactcctgagagcagcctccatgaggccctggaccagtgcatgaccgccctggacctcttcctcaccaaccagttctcagaagcactcagctacctcaagcccagaaccaaggaaagcatgtaccactcactgacatatgccaccatcctggagatgcaggccatgatgacctttgaccctcaggacatcctgcttgccggcaacatgatgaaggaggcacagatgctgtgtcagaggcaccggaggaagtcttctgtaacagattccttcagcagcctggtgaaccgccccacgctgggccaattcactgaagaggaaatccacgctgaggtctgctatgcagagtgcctgctgcagcgagcagccctgaccttcctgcaggacgagaacatggtgagcttcatcaaaggcggcatcaaagttcgaaacagctaccagacctacaaggagctggacagccttgttcagtcctcacaatactgcaagggtgagaaccacccgcactttgaaggaggagtgaagcttggtgtaggggccttcaacctgacactgtccatgcttcctactaggatcctgaggctgttggagtttgtggggttttcaggaaacaaggactatgggctgctgcagctggaggagggagcgtcagggcacagcttccgctctgtgctctgtgtcatgctcctgctgtgctaccacaccttcctcaccttcgtgctcggtactgggaacgtcaacatcgaggaggccgagaagctcttgaagccctacctgaaccggtaccctaagggtgccatcttcctgttctttgcagggaggattgaagtcattaaaggcaacattgatgcagccatccggcgtttcgaggagtgctgtgaggcccagcagcactggaagcagttccaccacatgtgctactgggagctgatgtggtgcttcacctacaagggccagtggaagatgtcctacttctacgccgacctgctcagcaaggagaactgctggtccaaggccacctacatttacatgaaggccgcctacctcagcatgtttgggaaggaggaccacaagccgttcggggacgacgaagtggaattatttcgagctgtgccaggcctgaagctcaagattgctgggaaatctctacccacagagaagtttgccatccggaagtcccggcgctacttctcctccaaccctatctcgctgccagtgcctgctctggaaatgatgtacatctggaacggctacgccgtgattgggaagcagccgaaactcacggatgggatacttgagattatcactaaggctgaagagatgctggagaaaggcccagagaacgagtactcagtggatgacgagtgcttggtgaaattgttgaaaggcctgtgtctgaaatacctgggccgtgtccaggaggccgaggagaattttaggagcatctctgccaatgaaaagaagattaaatatgaccactacttgatcccaaacgccctgctggagctggccctgctgcttatggagcaagacagaaacgaagaggccatcaaacttttggaatctgccaagcaaaactacaagaattactccatggagtcaaggacacactttcgaatccaggcagccacactccaagccaagtcttccctagagaacagcagcagatccatggtctcatcagtgtccttgtagctttgtgcagcagttccgggctggaagacagagacagctggacagagctcctgaaaacatttcaaaataccccctccccctgccctgccctgcctttggggtccaccggcactccagttggatggcacaacatagtgtatccgtgcagaagccgagctggcattttcaccagtgtagccaagggcctttgccaagggcagagcaggtggagccctctgcctgccctatcacacatacgggtacttgcttttcactgtgatgtttaagagaatgtatgaacagtttacattttccttagaaatacattgatgggatcacagttggctttaaaaaccaacaacaatcaaccacctgtaagtctttgtcttcacctattatcatctggaggtaaatctctttatatgatgatgccaaagggcaaattgcttttcaaattcagcaagttctcagcttgtgtgacggaaggtccttcagaggacctgaggaatgcctgggagaggctaagcctcaggcttcaatgcttctggggttgggcatgaggatgtacacagacacccactaccttactactcacacttcatttcactccttttgtaaatttccaatttaaaaatcaagcacgtctttttagtgagataaaatctgagctcttctgtagaaaaatcaatctctaccagtagaaaatgccagggcttgatggaagagctgtgtagccctttctatgccaaagccaggaaatttggggggcaggaggaggttctcagaatccagtctgtatctttgctgtatgccaaactgaaaccactgggaataatttatgaaacataaaaatcttctgtacttcactccaaggtacatttgcttactgacagcatttttgttaaaactgttattcttgaaaaaaaaaaaaaaaaaaa

SEQ ID NO: 3 - DNA, 4900 bp, Homo sapiens
aatcatgcttacgcatataggttaaccacagttatgtaagcaggttctgagaaaaggtgagaaagagaatggagagttttgctacaacagaggcaggattctgaatttatttccagctgcccatcttgtccctcctggagacctaacccctccagcacctacacacacagcctctttagaagcaactatcctgccactggctcagaaaggctgagtcctaagaattctaaaatcttgctcctaagaaatctcaagcttcttttgtgaaatcatagcccactaatgagttttggagccagctttgtcagttttttgaatgccatgatgacatttgaggaagaaaaaatgcagttggcatgtgatgacttaaaaaccacagaaaaactgtgtgaaagtgaagaggctggagtaattgaaacaatcaagaataaaattaagaagaacgttgatgtccgaaaatccgccccctctatggttgatcggcttcagaggcagataatcatagctgactgccaggtttacctggctgtgctttcatttgtaaaacaagaattgtcagcttatatcaaaggtgggtggatccttaggaaagcctggaagatttacaataaatgctatctggacatcaatgcccttcaggagctgtatcagaagaagctaactgaagagtccttgacttctgatgctgcaaatgataatcacattgtggctgaaggggtgtctgaggagtctctgaacagactgaaaggtgctgttagctttggatatggcctttttcacctttgcatatccatggtgcccccaaacctgctcaaaatcatcaacctgctgggttttcctggagaccgcctacaggggctttcttcactgatgtatgcaagcgaaagtaaggacatgaaggcccctttagctacattagctctgctctggtatcatactgtagtccgcccgttttttgccttggatggcagtgataacaaggcaggcctggatgaagctaaggaaattctccttaaaaaagaagctgcttatccaaattcttccctctttatgtttttcaagggacggatacaacgactagagtgtcaaatcaacagtgccttgacatctttccacactgctttggaacttgcagtagaccagagagaaattcaacatgtctgtctgtatgaaattggttggtgcagcatgatagagctcaatttcaaggatgcatttgattcctttgagaggctaaaaaatgagtccaggtggtcccagtgctattatgcctacttgactgcagtttgtcagggagccactggtgatgtggatggggcacagattgtctttaaagaagttcagaaactcttcaaaaggaaaaacaatcagattgaacagttctcggtgaaaaaggcagagcgatttcggaagcaaaccccaaccaaagcgctctgtgtgttggcgtctattgaagtgttgtacttgtggaaagctcttccaaactgttccttccccaacctgcagaggatgagtcaagcttgccatgaagtggatgactcatctgttgttggattaaagtatttgcttcttggtgccatacacaaatgtctaggaaactcagaagatgctgttcagtacttccagcgagctgttaaagatgaattgtgtcgtcagaataatttatatgttcagccgtatgcctgttatgaacttggctgtcttctattagacaaaccagagactgtaggaagaggcagagctctacttcttcaagcaaaggaggatttctctggctacgactttgaaaacagattgcatgtccgcatccatgctgctctggcctctctgagggaattggttcctcagtgacagacccggaacacccgctccgtccctccccacccagggtccgcactttaaaataaaagcagaggacaaagctcttgtgaagatgggcttttcttctgaaaaccacctgtgccagggacacattttcccagttaagctgacatattaaagatctcctcttttaaacatgtagctgaaaagtaataatgatgttgaggaggatgatgatggtaataataactaaccacctggggagagggttaagtgaccttgctcaaacgttttagttttgtgatttattatttttaaaataaaatcaaacggaacatccaacccaagatcctgtaggaacacctaccttaagcacatatctgaatgggtaacatgatgaggtacctgtaaaattattaacaatatcatgacatagcatttatatttgtgttttgaaaaaataaaagtgctttctagtgttttactttatcctcaaaatactccagtgaataacatagcacagatattcttaaccccactttgcagacagtgaaactcaggcacaaaaaggcaaattgacttatcccaattaattattcctgttatcagcagagcaatgaatagaaagcagatctcctgaccaccaactgacttttattgtaaaaataattcatgttaataggccagaattccatgttttacttattaaaagaacaaaatcttcagctgaagttatgtcaccagaaatagtcatctccagattgtctacagaatgtttcaaagcgatggacactctttttcctttgaaagccaaccaagtaagagcaaatattaatagaagataattttacaactaaaagtgtgactcttttgctaatctattagcctagtctatagattagacaaacagtatctacattttaggagtttacctttctttgtgaaaattgtcaaattaccaacttttggaaatcttttgacacattacttgaaaaggttattcgtgaatgaacatagattttggcctcaaaatatttgctggtggaacatttgctgggctacacagtgccaggatttaatcattttccccttagctcaggttatttagatattatacaaggaattcaaagttatttttttattcttcattgctaatttttgtcatttaatttacctccatgcccggtactgcaaacctgtggttttgaagaatctaaatacctcagtcacttttaagaatctctgccataatttggctcaatgtttaaggttagatttttaaagaaatttttattgagctaaaggatatcattttagggtatcgtttatttacaaattcttttggctgaaacatgatctcatattaatattttaatatttcttttcaaaataaaacagaaaagcaagtagaatgttggcaaattttatctgatttgaccttgttttgagggaatagtcataatttctttgaaagaagttatttctcactgattttggctaaacagtattcatatttcttcatctctgttactgaccacttttcagtagactgtttccaaaatgtgtattcacattgactttctccctgatgtgaattccgtgtgggttttagataatagtaagagagaagagattgctctcctatattcagtgaatgagaagggaacttttttctgaagagcaaaattggtgcccaaaaatattggacatctgttttttgtttttttttttttttttttttttttttgagacggagtctcgctctgtcacccaggctggagtgcagtggcgtgatcttggctcactgcaacctctgcctcctgggttcacaccattctcctgcctcagcctcccaagtagctgggactacaggcacccgcaaccacacccggctaattttttttgtatttttagtagagatggggtttcaccatgttagccaggattgtctccatctcctgacctcgtgatccacccgccttggcctcccaaagagctgggattactggtgtgagccaccgtgcccggcctggacatctggttttaactagatggaagggaagaacattatgaatctttaaaatacggctgttgccatttttctctcttcttaacatgcagcataggtgacaagcttttctgtcatcatcatggagcattctgaatcatgacatttttgtttgagagttcattcttgaattttcagttcaaaatattgtttgaactattattccacattcaaagattatataaggtcctgtgcttttgaatctttttcaaaacatttatttctgcctgcttaaaaaaaatacttttatttccccacagagagttcaggacttcagattagtttgtgttcagctcacttaactggatagacaattttgcgttttgcaacaccatcctgtaggttttctttactagtcaaagtgtaggtctttttaaaatttttaatctttatttttatttttattttgaaacagagtctcactctgttgcccaggctggagtgcagtggtgtgatctgtgctcactgcaacctctgtcacccgggtttaagcgattcttctgcctgagcctcccaagtagctgggattacaagttcctgccaccgtgcctggctaatttttgcagttttagtagaggcagggttccaccaccttggccaggctggtcttgaactcctgacctcatgatccacccaccttgtcctctcaaaatgcttacaggcatgaaccactgtgaccggccaggtctttttttttttaaagagtctatcctaggcttggtacagatggcgcctgtggtaaatctgtgttaacatggtggtagaccatggagaatgggtagatggagcttctagactccaaaacaacaaaaccacagtgtgagtacactgtcccattaggttgactgaagtctgagtacattttctggcctgcgtgccgtgacttatccaacctgtgaactgattgtgatctgcttggtaacttggtttggtgtaaactgctcttaaccctttgctgatgaagaaaataatcatataagtggaactatttgcatctaaaaaaaaaaaaaa

SEQ ID NO: 4 - DNA, 2334 bp, Mus musculus
tggagaagaaatacccagagaggaacaagtggtccctcagtgggacagcaaagcctaatgggtcagaagggccacaaggactccctttatgattgtaaagggtctcctgtgagcagcctccatgaggccctggaccagtgcatgacagccctggacctcttccttaccaaccagttctcagaagcactcagctacctcaaacccagaaccaaggagagcatgtatcactccctgacgtatgccaccatcctggagatgcaggccatgatgaccttcgacccccaggacatcctgcttgctggcaacatgatgaaagaagcgcagtcgctgtgtcagaggcatcgaaggaagtcttctatgacggactcattcagcaacctggtgcaccgtcctaccattgaccagttcacagaagaggaaatccatgcagaggtctgttatgcagaatgcctactacagagagcggccctgaccttcctgcaggacgagaacatggtgagcttcatcaagggcggcatcaaagtgcggaacagctaccagacttacaaggaactggatagcctcgtccagtcctcgcaatactctaagggagagagccacagacactttgaaggaggggtgaagcttggcgtaggagccttcaacctgacgctgtccatgcttcccaccaggattctgaggctgctggagtttgttgggttttcaggaaacaaggactatgggctgctgcagctggaggagggcgcaaccggacacagcttccgtgcagtgctgtgcgtcatgctgttgctgtgttatcacaccttcctcaccttcgtgctcggtactgggaatgtcaacatcgaggaggcagagaagctgctgaagccctacctgaaccgataccccaagggcgccatcttcctgttctttgctgggcggattgaagctatcaaaggaaatattgatgctgctgtccggcggtttgaggagtgctgcgaggcccagcagcactggaagcagtttcaccacatgtgctactgggagctgatgtggtgctttacctacaagggccagtggaaaatggcctacttctacgccgacctgctgagcaaggagaactcctggtccaaggccacctacatctacatgaaggctgcctacctcagcatgtttgggaaggaagactacaagccattcggggacaatgaagtggagttattcagggccgtgccaggcttgaagctcaagattgctgggaaatctctacccacagagaagtttgctatccggaagtccaggcgctacctctcccccaaccccatctccttgccgatccctgctctggaaatgatgtacatctggaatggctatgctgtgattgggaagcagccgacactcacggatgggatgctggaggtcatcaccaaggctgaagagatgctggcaatgggcccagagaatgagtactcagcagatgacgactgcttggttaaattgctgaaaggcctgtgtctgaaatacctgggccgaatccaggaggcagaggagaatttcaggagcatttctgccaatgaaaagaagattaaatatgaccattacttgattccaaatgccctactggaactggccctgctatttatggagcaaggcagaaatgaggaggccatcaaactcttagagtctgcaaagcaaaactacaagaactactccatggagtcaaggacacattttcgaatccaggcagccacactccaggccagatcttccctagaagatggcaacagatctctagtctcgtcagtgtccttgtagctttctgcagcactcttgggctgcacgatgaacagacagctagctggacagagcacctggaaacatttctaaagatcacctcccctgccctgcccttccttggggtccacctggtgctccagtaggattgcacaagaatatctgtgcagaagcaaagacagcatttttaccagtgtggccaaagccttcacacatacgggtacttgttttacactgtgatgtttaagagaatgtatgaacagtttacatttctttagaaatacatcgatgggattataattggtgtttaaaaaaccaaaccaaacaaactaccccccccctccaaacaaacaaaagcaacccgactgcctggaaagctgtttagctcctgacctggaagttctctacatgctattaaaggccacactgcttctcagacctcagcttttgaggacaggggttcctagcatctgagtcattgcaaattccaggacagccacagctacgcagtgagacactgggtccaaacaaaataaagcaaattaagttgctaacatttaa

SEQ ID NO: 5 - DNA, 2647 bp, Rattus norvegicus
gctgggatccggccgcagcacctgggctgcgcctggcgtccggcgcacgcagcgatgaccacggctagcggcccgggcgacctgcccgcggggtctccggtgagcagcctccatgaggccctggaccagtgcatgacagccctggacctcttccttaccaaccagttctcagaagcactcagctacctcaaacccagaaccaaggagagcatgtatcactccctgacgtatgccaccatcctggagatgcaggccatgatgaccttcgacccccaggacatcctgcttgctggcaacatgatgaaggaggcgcagtcgctgtgtcagaggcaccgaaggaagtcctctgtgacagactcgttcagcagcctggtgcaccgtcccaccattgaccagttcacagaagaggagatccacgcagaggtctgttatgcagaatgcctactgcagagagcagccctgaccttcctgcaggacgagaacatggtgagcttcatcaagggtggcatcaaagttcggaacagctaccagacttacaaggaactagacagcctcgtccagtcctcacaatactcgaagggtgagagccacagacacttcgaaggaggggtgaagctcggtgtaggggccttcaacctgacgctgtccatgcttcccactaggattctgaggctactggagtttgtcgggttttcaggaaacaaggactacgggctgctgcagctggaggagggcgcgaccgggcacagcttccgcgcagtgctgtgcgtcatgctgttgctgtgttatcacaccttcctcaccttcgtgctcggtactgggaatgtcaacatcgaggaggcagagaagctgctgaagccctacctgaaccgataccccaagggcgccatcttcctgttctttgctgggcggattgaagctatcaaaggaaatattgatgctgctgtccggcggtttgaagagtgctgtgaggctcagcagcactggaagcagtttcaccacatgtgctactgggagctgatgtggtgctttacctacaagggtcagtggaaaatggcctacttctatgccgacctgctgagcaaggagaactcctggtccaaggccacctatatctacatgaaggctgcctacctcagcatgtttgggaaggaagactacaagccattcggggacgatgaagtggagttgttcagggctgtgccaggcttgaagctcaagattgctgggaaatctctacccacagagaagtttgctatccggaagtccaggcgctacctctcccccaaccccatctccttgccaatccctgctctggagatgatgtacatctggaacggctatgctgtgattgggaagcagcagaagctcactgatgggatgctggcagtcatcaccaaagctgaagagatgctggccatgggcccagagaatgagtactcagcagatgacgactgcctggtcaaattgctgaaaggcctatgtctgaaatacctgggccgaatccaagaggcagaggagaatttcaggagcatttctgcaaatgaaaagaaaattaaatatgaccattacttgattccaaatgctctactggagctggccctgctatttatggagcaaggcagaaatgaagaggccatcaaactcctagactctgcaaagcaaaactacaagaactactccatggagtcaaggacacattttcggatccaggcagccacactgcagtgggattgcacaagaatgtctgtgcagaagcaaagacagcctttttaccagtgtggccaaagccttcacacatacgggtacctgttttacactgtgatgtttaagagaatgtatgaacagtttacatttctttagaatacattgatgggattatagttggtgtttaaaaaaaacctacccccccaaaacaaacaaaaccctctaactgcctgttaatctgtttacttcctgatctggaagtaatttccctacttgttatccaaggccaaactgcttttcaaacctcagcttttgaggataggagttcctagcatctgagactttggcttcaaagttctacattgcaaattccaggacagccagaactacacaatgagacactgggtctaaaaaaaataaaacaaaacaaaacaagttgctaacatttaaaatttgagttttcatataaatttgtcttctaattgaaaaaaaaaaaaggcatgagaatcagaagctcaaggccagtcttggagtctgaagccagatgaggtgcttaattgaaaggaaagtcttaagacaacaggaggctactctacaacctgttagctttctgtggcttgcagcccacattataatgtcagtcaaaacaaacactctatcatgatcctttttctcacttaaagctttttttttttcttcagaactacacaaaaaaaaaaaaaaaaaaaaaaaaaaaaaccctttctacagacaaaccctttacaagtatgttttttttctaaagcctggatactatgccaaggcagcactggtcacatcactaacacatggttggtaaaactgcagcttacaagactgcttttgcttctcttttaaactgtgtgctgctgctgccgatttcctggtgacttcatttaactagccaatttttacctcaatt

SEQ ID NO: 6 - DNA, 8764 bp, Mus musculus
gtgctgggctgaacccagagccagaaaagagtcggttctgagttccctgtgggtgtgcggccgccgcggaggggaacatggcgctcgtgggcagccgagtggaattggacgcggacgaggatatctttgaagatgccttggagaccatctctagatctccatcggacatggccaccagcggctttcactttgtaccatgcgagaccaaacggacctccagacagcttggagcatctgctatgggaagacctgaaggttcatcagccaaggtggatctcaagagcggcctggaggagtgtgcagaggcactgaacttatttctaagtaacaaatttaaagatgccctagagttgctacgtccatgggccaaggagagcatgtaccacgccttgggctacagcaccattgtggtgttgcaggctgtcatgaccttcgagcagcaggacatccagaatggcatctctgccatgaaggacgctttacaaacctgccaaaaatacaggaagaaatgcacagttgtcgagtctttctcaagtctcctttctcgagggtccctggaacaactgagtgaagaggagatgcatgctgagatctgttacgccgagtgtctcctacagaaagcagcactcacatttgtgcaggatgaaaatatgatcaacttcatcaaaggtggactcaaaattagaacaagttaccaaatatataaagagtgcctttccatcctgcacgtcattcagaagaacaaacaagagcagcacttcttctatgagtttgagggaggagtcaagcttggaacgggggcctttaatttgatgctctctcttttaccagcaagaatcatccggttactagaatttattggattttctggaaacagggacctaggccttctgcagctccgggaaggcgcatcaggaagcagcatgcggtccccgctctgttgccttaccatcctggccttccatacctacatctccctcattctcggtacaggagaagtgaatgttgtggaagcagagagtctcctcgctccgttccttcaacagttcccaaatggctccctcatactcttctatcatgcccgaatcgagctgctcaaagggaacactgaaaaggctcaagaaacatttcgaaagtgcatttcagttcaagaagagtggaaacagtttcaccatctctgttactgggaattaatgtggattcatatataccaacaaaattggatgcaggcgtattactattcagacctactttgcaaagagagtaaatggtccaaggcaacatatgtgttcttgaaagctgctattttgagcatgcttccagaggaagaagtggcagcgactaaggagaatgtggtgtctctgtttagacaggtggatggtctgaagcagagaatcgcggggaaatctctcccaacagagaagttcgctgtgaggaaggcgcggaggtactcacccccgtcaggcgtccccggaaagctggtgatgccagccctggaaatgatgtacgtctggaatggcttttcaatagtgggaaaaaggaaggacctttctgaaaatctcttggtgactgtggagaaggctgaggaggcattgcagaatcaagactttactgactactctgtggatgatgaatgcttggtgaaattactgaaaggatgctgcctcaagaacttggagcggcccttgcaagctgagctgtgtttcaaccacgttgtggaaagtgaaaaactattgaagtacgaccactatctggtgccatttacgctgtttgagttggcatttttgtataaaagccaaggggaaattgacaaggccatcaaggtcctagaaactgcaagaaataactataaggattactccctggagtccaggctacacttcagaattcaagcagctcttcatctctggaagaaaccttccacggactgatccggaacacacaggatggatcttcccccccggttaacattgactcttgctatggagatcactctctgtgtcaaggtggacccatgatccatcaaataagaaacagaaagcctgctgtcagccacttcctgtcatcggagtggcgtactgtttggtctacatactttcccctctggaatgacatttaatactatacagaaattcttatactctgccttcactgtagatttcaattgagggggtgaagtcttttaaaagactggcaggtacaataaagcctagttagattatttatttttttaatgtaaaaattaatattgttcaaatagcaaatggctttatcagctgagccatttttagattggcttgtcctttaaacttcagagatattttactgctgtttaaatctctgagagtaaataaatatcacatctataatagtatgacagtgggtttctgaagattctggaagagagaaatgaggggcctgaggtgggtgaagtattcctaggcagaagggacttgtatctcagcaagatgtcacagttgtaagtttcaggatttccagtcctctcattggttgaaggtggtggcatttttcagaaactatcctgtatttgaatgtactcatatcagatccaataatagcattcaatcacatagacacatttctcatgtatctaagggaataaaaagctgtattttagatctccctaagcttagtgctgaagcctgaactacagacttccattgtgtttcttacaggaaggagaagctcctgttgctgtgagtgatatgtgacatgtcagtgattgtttacagtcatgatgctgctgacccagggccatggctgcatcttggttctctgagtaggaacccggatcagagcctgagcagatgcccttctggggtccccacacctgtcaatcaccctttgtgaattagaaagaacacgctcatttcgagaaacagaaaaggcacagatggctttaatttctctttgaattgtgtaactgtgagtctctgtgttagacactttcaacaatgcttagcattaatccaaactcttcccattagaatatagtttcttcaacccctcgctctcctcccaatcaacggcctatcaatagtgggtgttacagctgagggccagactccacccagtgacaaaaaccagttagagtccatggacctgggcttttgtcttgtttctattatttccaagaccagtaacttctctagagggtagatggctccaccttccctcgtcagcgccccaggtttgtagttctgagtctttctctgttggttaatagttaacaacataaagcaaataacttaccttttccaggacttgggttttccagtgggagaggcaaggtagcactcactgcctgcagcctccagagctggtgcatttggtagctttctgtatactggggaagctgtacacggaggagtgagtttgataactatggccttgcacatggattacaatacctctagtatccgctgagtctgtggtctcttgtctacagtgagatgaacgtgagcattcatgacctttcagtttatttatttatgcatttagcactgacagtggcccagattatggagttgctcctgctgtccccgactgcagttccccatgctcagcaggcactggtggcctgttacgtaaggtgccatttcttattcaacattgataacacggaggcagaaatcattatatctcactaatatgaatcacacaattagctacagatagtagggaaataaattgtcatgagctatagaaatatgtttaataattatatatatatatatgaagaaaagtttataaattctttagaagagctttgataacgatattttaaaaacaatctattcatactattaatgtgatggggtgtggtggcacacattgttaattctagcatttgggaggcaggggcaggcaaatctctgagttcgaggccagcctggtctgtttattcaaaactcaaaccaaccaaacaaaaagaatacccatattttgtgagaaactatcaaagctcatggtctgtaaattcccattctgatattaaatgaaaaaaattaagctaaaaatgactgttttagagactggagggtgtcccggcagttaagggcactttctgcttttccataggaccagagtttgtttcccagcacccatggcaggcagtccttaactgtctgtaactccagaagagctgacactcgctctggcctctgtaggcacccaaacacacatggcatgcattcacatagaaacatacatacatacacattaagtagacaataaatcattttttaaatgactacttttatactatcaaacaaatctacttgtgctattttattttgtggttttcttttgtttatattgctcaaattctctctgtcagcactgtggaccatctatcagtggctttataagtactgcaatagaattaataccacagaactttatctattttctgtcatgttcaagatactgtaccggcaccaatttcttaggatgtttgtaagaatcatcttttaaaatctgttgtgatttaagatgttttgtgaagagcaagtgcctaagagacaacgttatctaatcatctttttgaggccacgggtaataggctgggtttccagtatgtctgattgcagtttctgtagctacctgcagaggcagtgttctgatcggtgttttgtaaatgtaaggattgtatttcagagccttgggagggaaagcctaatttccttgggagaattgatggaagggtaactacagcaactcccgagtatatttgaccacttgctctgtctgcacataggagatgttccctatttacactgcagacagttgagtggccttctagttgtcctgaggacaggaagagacaagtgggcaggagctaagggagatcaattcagattcctggacactgcagctgttcgagcaatccaacagcccaaccagctccttgggaatggagtgaattcagcagttctggtgactgtcatcccgccctggtctgagtgtctgtctgggttaattgaattggaggtcagctcattctacaatgctttgatcggggtctaaaatctgaggtagggaaaggtaaaaagcaggtaccctctcttcaaatagaagcgcatgttccttgtcaatcattctactgtgatgggcactagtgtcatctgctattgtgtttgttatgggtctggctggctcatctgtcctgtgccatctattctgggtagatccttgttagtagagacccgcaccctggacagtaaaaataatggaaaaagtctttatgatcaagtggaaaactaatcctggaattattctgcttaattctctggacattttgtttttcctcttcctttcttttcctttcctttcctttcctttcctttcctttcctttcctttcctttcctttcctttcctttcctttccttttcttttcttttcccactggtttgccaactttgtattcctgaatcaccagttctggtgcattcagttggaattagttcatgaagtaactgaaattctaagcatttgtgatttatcaggtctagaatggatcttagaaaactacattgtccctttcagcctgtgagcatgttgggcctgctgttctctgtctactgcaatagcaacttgtcagctgtcgctgctctactcttgccgtggccaggggacctccctcttacaccatgttgtgtcatacatctctcagtggtttactttttccatcccgtgtactgggcagatgatagagctccgtggcttgtttgaacattggcctttacccacctctcacccctgtgaacttcttgtgtgccatctcaaagtctttatttttaagattactaggttattttagaaactatcttcgatgtcacagctgttggggttgtagaaatatttgtagatttcatgagtaagacaatttatgaaaaatctagtgacccctttgcaagactttggcattatggaaatgctaacattggttctcgtagctagcccattatactatttaaaggttgttaggcacaatttatttcccttagggagtaacataaaaggtgacttaactaaatttaaatatttcatgccttccagttgcctattgtgaatatcttgagtgtgtgtgcctaagcgatatacataatacaagttttaatctctttaagcatctcttgattagatgcaggggtagctctaatgtatcaatagaccggtatcagtaagtaatataaaataacccatattggataatccttcatgcccttttaggatgaaagcatttctccgagttactttcttcctcagagcccagttgtctacgtactttcctttatgtattagctggccagaaccctgcatctttagttagtatttttttttggcatattgtacatttgctgttagctcttgttattttagaatgctgaacttgaaatataatgtaaagggcacatcagactttatcatcatggaagatagacttcacattgaatggtcctctctgacctggacagcctttcacatggggaacaatttaaatccatcccaatccatttctaaaacctcattgctgcaggaagaagcagcaagaagagctcttctgtgtattgaggtggctgagcaggttcttagccttaaccatgcagaagaaggattcgtggatgcagccccattcccttctaattgcactgtgtacagtgacagagtcagcacagtattgctgcgacaggactttgtgtgcaaagatcaaagcagctgccttactgtgtttaaataataaagaatgtctgcacatgcctacaggttgaattgaattttattttgtggtgctagaaatggaccacggagggctggtgtaggctttggaagtgcgctatacctgagccacatcctcagccccaggttgaatattgaatggaaaaagtcaaggtctgctaatatcaaacttactgacagtaagtgcacaccgcaccttgtatgtcacagcccagtggttcttaggttctgtgtaatttaaaggataaatttaggggacactgggtgcatttaattttattgcacattaactttttttatttaaatatttttaaggactttgaattaaaagtcttcgtagtttgtgtaccaaaagaaaagaaaaagaaattgttttcagtggaacgtaactgataatgagagtatctgaataactgaacatattaaggaatattacttacatttatctaggaaggaattgcattattctgagtttgaagtatactcagattgaaggtgtgactcattctgcttgaggaatcacacacacacacacacacacaaacaccttactttagtcttatcttaatggagcaggagacccaggcaggtcacagttttggagatagtagatgagtataaataattttcacaaattcccatttttcctgaagtaattttttccccacagtagacagttaagtgttttcggtacagctctccccttgcccactcttgtattaaaccaaggttaccagcacgggtgctaagtaagctcgggaccacagagcacttggcccaagggatttatttttaacttgcacaaaagagagagattatggtaaacattttaaatctcaggctcttggttctgttgggtccagattacccaagacctagagagactgcgtgtcactggctcgtgctgtacaggaaaccacttatggttgacagtgggttgtgcaccgtcactgtgtcatggggattccagaagccacgtcttcaccgctttcatcagtttttccttttgttgactgttggcatctgaccacctgggtgaatatcagctgtctctttatagattactattttaaaatatttatttcagatgttcatagaatgttcaattttttgatgcaagttatttacagaggcatatatatttaataattgagatatattattttattgcacaacctattttccaaagcaaatttactttgtaggtgtttgtctttttgtgaagaaaaaaatgtttttttcttttgcctcaaaatacaagttgtaaacctgtcttctggcgtaagtgactcttgtgataatatttgctttccgcttatttgtgaaccagtttggagttgccagttgaaccctcagagctcccctctgacctggattcagtgcagtgctggtcaaacttggcattgtttccctgcctcggtttcctctcctcattgcacttgagtttggcctccgttagttcgtttttcagcaatcagttttacagaggaaaaccgccttaggaattgaagaggttagaactctttgtaaatcgaatgtgttattaacatctgtctgctaataagtggattaaggtctggtcctagagaaagagaccagctagaaagaacaagaaaagtgcaaatatttttgatgtaaatgttgtgttcccgtgacttttcatatgctgattttatgttaatgtgatcacctgtgatatttaagtgaccgcagataaagatttaattttcaacctgaagacggcaggtcctgtttctatttttaatattgagacagttttgaaaacagatgtcgtattataaattgtatttttaagtggaaataaatcaatttgaaagtcagtgttttccttttctttgtcccttacagaaggctctgtgttattagatatatatttaagttgccagattattttcagaattctctattttcatatcgctgtaaccagtttgcctacaatgtgcaattgaattgttatttaataaatgacacgtgatggg

SEQ ID NO: 7 - DNA, 2676 bp, Rattus norvegicus
ggcggggacagctcggtccagtcgctcggggccgcctggttcctcctccaccggcgctgggctgaacccagagcccagaaaagagtcggttctgagttccctgtgggtgtgcggccgccgcggaggggaacatggcgctcgtgggcagccgagtggaattggacgcggacgaggacatctttgaagatgccttggagaccatctctaggtctccatcagacatggcaaccagcggctttcactttgtaccgtgtgacaccaaacggacttccagacagctgggagcgcctgctgtgggaagagcagaaggttcatcagccaaggtggatctcaagagcggcttggaggagtgtgcagcggcgctgaacttgtttctcagtaacagattcaaagatgccttagagttgcttcgcccatgggccaaggagagcatgtaccacgccttgggctacagtactattgtggtgttgcaggctgtcatgacctttgagcaacaggacatccagaatggcatttccgccatgaaggacgctttacaaacgtgccaaaaatacaggaagaagtgcacagttgtggagtccttctccagtctcctttctcgggggtcactggaacaactgagtgaagaggagatgcatgccgaaatctgttatgccgagtgtctcctacagaaagcagcactcacgtttgtgcaggatgaaaatatgatcaacttcatcaaaggtggactcaaaattagaacaagttaccaaatatataaagagtgcctttctatcctgcacgtcattcagaagaacaaagaagagcagcatttcttctacgagtttgaaggaggagtcaagcttggaacgggggcctttaatttgatgctgtctcttttaccagcaagaatcatccgattactagaatttattggattttctggaaacagggacctgggccttctgcagctacgggaaggtgcatcaggaagcagcatgcggtccccactctgttgccttacaattctggctttccatacctacatttccctgattctcggtacaggagaagtgaatgttgcggaagcagagagtctccttgcaccgttccttcagcagttcccaaatggctccctcatcctcttctatcatgcccgaatcgagctgctgaaaggcaacgctgaaaaggctcaagaaacatttcgaaaatgcatttcagttcaagaagagtggaaacagtttcaccatctttgttactgggaattaatgtggatttatatataccaacaaaattggatgcaggcgtattactattcagatctactttgcaaagagagtaaatggtccaaggcaacatatgtgttcttgaaagctgccattttgagcatgcttccagaggaagaagtggcagtgactaaggagaatgtagtgtctctgttcagacaggtagatggcttgaagcagagaatcgccgggaaatctctcccaaccgagaagttcgctgtgaggaaggctcggaggtactctccctcttcgggtgtcccaggaaaactcgtcttgccagccctggaaatgatgtacgtctggaacggcttttcaatagtgggcaaaagaaaggacctttctgaaaacctcttggtgactgtggagaaggctgaagaggccttacaaaatcaaaactttactgactactccgtggacgacgaatgcttggtgaagttactgaaaggatgttgcctcaaaaacttacagcggcccttgcaagccgagctgtgtttcaaccatgttttggaaagtgagaagctattgaagtatgaccactacctggtgccattcactctgtttgagttggcatttttgtataaaagtcaaggggaaatcgacaaggccatcaaggtcctcgaaaccgcaagaaacaactacaaagattactccttggagtccagactacacttcagaattcaagcagctcttcatctctggaagaagccatcctcagattgatccagaagacgcaggatggaatcttgccccccagttaacgttgactcttgctgtggagatcagctcgtgtcaaataagaaacagaaaagctgttgccaggcccttcctgccaccagagtgacttattgttggtctacatacgctcccctatggaaggacattcagtactatatagaaattcttatactctgcctttgaaaaggacttcacgctagatttcaattgaggggtcacgtcttttaaaagactggcaggtacaataaagcctagttagattatttatttttttaatgtaaaaatgaatattgttcaagtagcaaatggctttatcacctgagccatttttagattggcttgtcctttaaacctcagatattttactgctgtttaaatctcagagagtaaataaatatcacacctctaataatacaacagtgggtttgtgaagattctggaagggggagtggaggtcctgaggtgggtacagtgttcctaggcagaagggacttgtatctctacatgatgttacagtcgtaagtttcagggtttccagttggttgaaggtggtggcatttttcagaaactatcctgtatttgaatgtactcatttcagatccaataatagcattcaatcatctagacacacttcttatgaatctaagggaagaaaaagctgtcctttagaactccc

SEQ ID NO: 8 - DNA, 2401 bp, Mus musculus
ctcagcctgggcgctagcctgggggcctctggggccggttccggggcctggaggggctgcaggaagcggaggtagctcgggacgcctggatcgaagcgggcgcagacacccgaaacggctggggtggccgcgagccggctgctgagtaatcccgggcggcgggtgggggcggccgggcgcccacgttccccgcgccgcagcccggcggcggctccgccttcgcgtccatccccgccccctgccggctgctgtgctctgctccccgcaggtcggagccgggctccgggagcgcgggccgctgcagccgcctcctccggcacctcgcctcggcccactcgaggcctcgtgtgcccatggccggctcggaggagcagtggccgcggcggagggaggacggcgacccggacgccgcagcggcgcccctgcaggacgcggagctggccttggctggcatcaatatgcttctcaacaacggcttcagggagtcggatcagcttttcaaacaatacagaaatcatagtccactaatgagttttggagccagcttcgtcagctttttgaacgccatgatgacattcgaggaggagaaaatgcagttggcgtgcgatgacttaaagactacagagaagctgtgtgagagtgaagaggctggtgtaatcgaaacaattaagaacaaaattaagaagaacgttgatgcccggaaatccaccccctccatggtcgatcgacttcagaggcagatcatcatcgctgactgccaggtttacctggcagtgctttcctttgtgaaacaagagttgtcggcctacataaaaggtgggtggatccttaggaaagcctggaagatttacagtaagtgctatgtggacatcaacgcccttcaggaactgtatcagaagaagctgacggaagagcccttggcttctgatgctgcaaatgataaccacgttgtggccgaaggggtgaccgaggagtccttaagcagactgaaaggggctgtgagctttggatatggccttttccacctttgcatatccatggtgcccccaaacctgctcaaaatcatcaacctgctgggctttcctggagaccgcctacagggcctttcttcactgacgtatgcgagcgaaagtaaggacatgaaggcccctttagctacattagccctgctgtggtaccacactgtggtccgcccattttttgctttggacggcagtgacaacaaagggggcttggatgaagctaaggcaattcttctcagaaaggaatctgcttaccccaactcttccctcttcatgtttttcaagggacggatccagcggttagagtgtcaaatcaacagtgccttgacttccttccacactgctctggagctggctgtggaccagagggagatccagcacgtctgtctgtatgaaattggctggtgcagcatgattgaactcaacttcaaggatgcatttgattccttcgagaggctgaagaacgagtcccggtggtcccagtgctactacgcatatctgactgcagtttgtcagggagccactggtgatgtggatggggcacaacttgttcttaaagaagtccagaagctgttcaaaaggaaaaacaaccagattgaacagttttctgtgaagaaggctgagcgatttcggaagcaaaccccaaccagagcgctgtgtgtgctggcctccattgaagtgctctacttgtggaaagcccttccaaactgctccttccccaacctgcagaggatgagtcaagcttgccatgaagtggacgattcatctgtcgttggattaaagcatttgctccttggtgccatacacaaatgtctaggaaactcacaagatgctcttcagttcttccagcgagctgctagagatgagctatgtcggcagagtaactcgtacgtcccgccatatgcgtgctatgagcttggctgtctcctactggacagcgcagagactgtgggaagaggcagaactctacttcttcaggcaaaggaggatttttctggctacgactttgaaaacagattgcacgtccgcatccacgctgctctggcctccctaagggaacttgttcctcagtgataaactcccagtggcccctccgtcccctccacccagagtcagcactatgaaagctgaggagaaaactctcttgaagatcagcttttcttctggagaccacctgggccagggatgggtttcctggtgtcactgacatactaaagattcctcttttaaacatgtagctatggagtaataaagatgtccataacgagagcaatgcccgacctgggagagggttaagtgaccttgttcaaactatttagttttgtgatttattatttttaaataaaatcaaactaaatattcaaaaaaaaaaaaaaaaa

SEQ ID NO: 9 - DNA, 1977 bp, Rattus norvegicus
ttttcatagagatgtggccttgcaaagcagtgtaatttggccttctctgccagaatccagtttgcctctggcgatttgctacagtggaaatcatagcccactaatgagttttggagcgagcttcgtcagctttctgaacgccatgatgacattcgaggaggagaaaatgcagttggcctgtgatgacttaaagactacggagaagctgtgtgaaagtgaagaggccggagtgatcgaaacgataaagaataaaattaagaagaacgttgatgcccggaaatccaccccctccatggtcgatcgacttcagaggcaaatcattattgccgactgccaggtgtacttggccgtgctgtcctttgtgaaacaagaattgtcggcctacataaaaggtgggtggatccttaggaaggcctggaagatttacaataaatgctatgtggacatcaacgcccttcaggagctgcatcagaagacgctgacagaagagcccttgtcttctgatgctgcgaatgataaccacattgtggcggaaggggtgactgaggaggccctaagcagactgaaaggtgctgtgagctttggatatggcctttttcacctttgcatatccatggtgcccccaaacctgctcaaaatcatcaacctgctgggctttcctggagaccgcctacagggcctttcttcactgacgtatgcgagcgaaagtaaggacatgaaggcccctttagctacattagccctgctgtggtaccacactgtggtccgcccgttctttgccttggacggcagcgacaacaaagggggcctggatgaagctaaggcaattcttctcagaaaagagtctgcttacccaaactcttccctcttcatgtttttcaagggacggatccagcggttagagtgtcaaatcaacagtgccttgacttccttccacactgctctggaactggctgtagaccagagagagatccagcatgtgtgtctgtatgaaatcggctggtgcagcatgattgaactcaacttcaaggatgcatttgattcctttgagaggctgaagaacgagtccagatggtcccagtgctactacgcatatctaacagcagtttgtcaaggagccactggtgacgtggatggggcacagctcatttttaaagaagtccagaagctattcaaaaggaaaaataaccagattgaacagttctcagtgaaaaaggctgagcgatttcggaagcagaccccaaccagggcactgtgtgtgctggcatccattgaagttctgtacttgtggaaagcccttcccaactgttccctccccaacctgcagagaatgagtcaagcttgccatgaagtggatgattcatctgttgttggattgaagcatttgctccttggtgccatacacaaatgtctcggaaactcacaagatgctgttcagttcttccagcgagctgctaaagacgagtcgtgccgtcagaataactcatacgtccagccatatgcctgctatgagcttggctgtctcctgctagacagagcagagactgtagcaagaggcagaacgctactccttcaggcaaaggaggatttttctggctacgactttgaaaacagactgcacgtccgtgtccatgctgctctggcctctctaagggaactggtccctcagtgataaactccgagagacccctgtcccctccacccagagtcagcactgtgaaggcagaggagaaagctctctagaccatcagcttttcttctggagatcacctgtgccagggatgtgtcctggtgtcactggcatactgaagattcctcttttagacgtgtagtgcggagtaataaagatgaccaaatgataacaagaagtggcctgggagggggttaagtgaccttgttcaaacactttagttttgtgatttattatttttaaataaaatcaaactaactattaaaaaaaaaaaaaaaaaaaaaaaa

SEQ ID NO: 10 - DNA, 110000 bp, Mus musculus
gctactgttatgaattgtaatgtaaatatccgtattttctgatggtctgggcaacctctgtgaaaaggtcattctaccacagaatgagaactcctgcctcaggctctctctccttccaggatgagaatcctgaagggagttctgagtttttgagatcctttgttttgatagtctgagagacaattagaggggcacacatgcttgtttatttgtctttgtagacaatcaccctccctcccagtctggttacaaaatggttacaaaggtgttactagaatttttgggcatcccttcatagtagctaaccaatactgagaaaatcaaggtctcctcttgggggttcttagtttcatcgataaaataatttaagagtggactcaattggaagctagaggacaattttctgagagtttagaagaaataaaactccaaggcaggtgaactgaaaatctcaggttcttctcagaggaggcaaaaggagaaggaaaaaaaaaaacccaaaacgaacaaaaaccaaaaaccaactcatcatggaggtgagacccacgatggggaggagctatgcttagagaccataggcttagaaaagagaagaaaaggaaaagtttagcttttctgagtaactcggaaaagcgggcagactcaggaaactgcatgccggctgctctgtaagagactgtgtgtatgtacagtgcattatctcattaaagaaagaagcattccacttacctttttaacgtggctacagaagaacccgccttctaaggggcagtgtcttagccagatgattgacatgccttacaaaaatgtcaattctccaaccagattaatatctagtattctcttgaccaggaggagtttttaccttcattggtcttaactgctgctgtgtcaaagacacttggagacaataacatcatgaagctggtatcaaggatgccatggtgactcctgggaaatgtgtgttaataggcctcctctcagctagtctcctgaaatccacagggagaaaagaaggttggctgtagtcacagagagaccggctattagccaggtgctgccgccagactgcgtttctgattctggcatcactgttttacttagcagcctgaccctaggaaagtgacttaaactcttactaaacagtgtccctcttcctatgagaataagtgagacaaaacatacaagggccccagcatagtcctagtacacgattagttctcaattacaattagtttcctgtttttatgtttacagaccgataagccgtatttcataaatcagatagatactgagtatgtaaatgactgcatacaacaaagtggggagagatggggtgatagcaacgatagaagtttggtgtctggggacaccacagaacagggataggacatttttgggatgctctatatgagtggggtgtcttgtaacatttgttaccaaattacaccgttaggggagtttaaaataaaactgactctcaaccctaaatatttatagttttaactttttttttcccagttggatagctcagttattttgcaagtcagaaacaggaatcaatttctaaatacagtcaaaaaacattgttctaggttctagggatatagcatagaaaaagacagcatccttatcctcatggataattgaagcacaaattatgtctatttggatttacagaaggctgagtgagagatggtgtagcaataaaaacctggaccgtgctgggagatgtacagggctctgagttacaccgaagccgttacttcgcaaacacagaggcaaaacagagctcctatctcttggagaggatgttcttgacacagcgacttgggcatgtgatgtgtcagatgcctctaggtgaccagtgacccatagctgtcctctagctgcatctgtcagatgctctgtcctctgggcgaagtaaacgctctggttccagaccaaggaccaggtggaccactagccacagagggagcgcagccacgaccttgggttgtcagctctgcgcgctccagtcacggcgccaggctcctgccaatcctctagggaggccagtaccccagaggtccttttcccgagcacccgctgactctgtgggtgactcctccccacggaacctggttggctgctctctaaggaggccgcgtgccggggcggggctatccggcgagggggcggggcattagcctggcatccgctggggtactgggtgcgcagtggataccgcggcgccgggggcggggacagctcggtccggtcgctcggggccgcctggttcctcctccacccgtgctgggctgaacccagagccagaaaagagtcggttctgagttccctgtgggtgtgcggccgccgcggaggggaacatggcgctcgtgggcagccgagtggaattggacgcggacgaggtgcgaggacaggcagagcgggctggtccgggcaccggcgggcaccggcgggcgtgggagggatgcggagcctccgctggcacggagggtgggcagggctgtccttcacgccgaggagcgtcccacggggccaggcagagcagcccgggccagcctgagcctccttggaccctatgggcttttgcggaaccgttctggactcgacttctgtgtcgctttctgtggaagttccgcgaggtgtccgccgggcgggtggggtacggctgtctagtcaccccgggaccgagggccggagcctgagccccgcggccgggaaaggtcccttgtccagaatcgccggcggcctcgcctctctaggctaccgaagtgacctaccgggtcctcgcgcggcgccggggtctgaacgctcccgggcgggggcgcccgacctgttgatttcagcgcttccttcagctgctgctgggagcgcgcgctctgctctcaagttgagggtcaggctcctgccgccgcctctgctgccattttacctgacttgaattttacaagtcgcggcctgagaaagccttgatttccaatgatgcaatagatgggtgatgtggaggaggcgagtgagttaggattcggtctttactgccagaagatcctggtaacgagtaaatactgtgctttaaatgttgacattaagaaccgatcaaaaccccaaggatcaatctttatgctacagacagttaaggcggcgaaccagagctttctgaggaccagccttgcggtgtgggcccaagaccacacaccagggaattagcgcttgcccagggggcatggatgtgttgctggaccttctaaggacacacaaggcaaacaatgagatagaatatttgttactattttcttctgtgacaacttttatttatagctttaggcagtcttttggcatggcctgttgcctgcgcttttaaattttacattcgtaatccaggtaacacactactacggtactttgaccatctactacttcctcaagagtttctaacgttccctcttgtgtatacattaaatagccacagtcttggcatgatggaggctgttgtacagtctcaatagcttatcccaggcttgtctccagctgcttccctgtccataaccatttaatctatttgtattgaaaatgaaagaacaatcctgagcctggtctgtaatctcagcactcagatggctgagtcaggagaatcacaaattcaaggctaaccaggtctagacacatagaaaaatcgactagcatggatatttttttttcttccgtaataaagaaaaaaaaaaaaaaacaatcaagacccagagtagctcctaactatagagtggtatttctgactctggctcactgttgaagaaatgcaagccataacagtagatgttaaatgggattgtcttggcatattgagatgaaggttactctgtcaactgccaataaaacaaactcaagagctcatgtcgaagttaggtatcagagcagcagacagcctggcacaaagacttgaatacatgtttgttgagtgactgcatgactgcagaaaagatatgcctccatcagacctcagtttttgccttattactgataagctcccaatgatggacaaggcacaaagggactttttgttcctgccaaatctatgttttaccctcatggtggacaagtatgtgggcatacgtttatccactctctactgagtgcttaagtactctttgcttaagtttgctaccttagagagagaaggtacagctttggatgtctaggtctcccagagtgccagggagagaagtcatgtgtggacccatttagggtgaacgagcaggtgtacagtagggtgttgtaggtatgcttgaagtacttgtaaaatattcctaattgtaagtggattaaagaactctacctcactaggcagtggtggcacatgcctcttcaatcccagcacccagaaggcagagacaggcgaatctcttgagttcaaggtcagcctggtatatatagatcctgttccaggacagctagggctctgttacccagagaaaccctgtctggggggggggggggaggtgttaggggaggaagaaagaaaaaacaaaaccaaaccaaaccaagaacaaacaaaccaaaactgagctccaccgtgagtgtggaagactgtcaggttcaccaggtgtgtgagtagaccggagggagcttatcccaggctttcacaccctccagggcactttgctttcttcctggccattgtttgatgcttttgagaggtgaaaagggaccgaagcattgtagctgagaaggttctaatctcgttgcctcacttttgggtatgtgtgtggggttaatttacggctggccattcagacgttaaaatggcaaacctctgatcttaggtgccaagctagtgctgactgggagatcctgacagaaggagcctcatccacaactgactgctaagtccctcagcccctgagggcttagtcaggttcctggtcctgaggagttagggctaggaacatcttaaatgttctagtgttaggggttttttgggggtggggtgggagggtaggtggggagggagatcttttttgaggtcatgactaatactatgagaatacttttcttcctaagtacccacagaaatgatagtggtggggaaacttatagtatctcttgggtggattttggtttttaaacagatttttaaatgattgactcttccttcctccctctttctttctttctttctttctttctttctttctttctttctttcttggttttttgagacagggtttctctgtgtagccctggctggcctggaactcactctgtagaccaggctggcctcggactcagagatcttcctgcctctgcctcccaagtgctgggattaaaggcgtgcgccaccattgctcagctttttaaatgacttaagagggggctggagagatgactctgtgattaagagcactggctgctcttccggaggacccacgttcaatttttcagcacccatatggcagctcacaagtgtctgtaactttcagttccaggggatccaacagcctcatacagatatacatgcagagaaaacaccagtcaatgctcattaaataaaaataaatttatttaaaataactgtttagattctgtaaagagaagtatggttgcattttgtcttagtcagggtttctattcctgcacaaacatcatgaccaagaagcaaggtggggaggaaagggtttattcagcttacacttccacactgctgttcatcaccaaggaagtcaggactggaactcaagcaggtcagaaagcaggagttgaggcagaggccatggagggatgttacttacaggcttgcttcccctggcttgctcagcctgctctcttatagaaccaagactaccagcccagagatggtcccacccacaaggggcctttcccccttgatcactaattgagaaaatgccttacagttggatctcatggaggcatttcctcaactgaagctcctttctctgtgataaccccagcctgtgtcaagttgacacataaaaccagccagtacacatttcattttttttttagaattattttatttttatgtacattggtgatttaatagaaatgaacaatttgtgtacacaattacacacacatatatatgaattgcatttcaaattgaaagtcattcagtaaatacagttattaagttactaatagctgtaaaatttggatttaacatttacagttttagttattttgaactcattattgagtaggaaaattaagccatttatattctcttacacaatacatacatgttattaaaattttatgggcaggtgcaaataggaaagcatctaaaagagcgacttaaggaagtgataatgaaaacaaaaaccttacaaaacactgaatcatgtgaagaaatggcttaggatgatttttatggcctgttcgggatgttttttttacagatggagtcttgctatgtattgtgactgggtaggaacttgactttatagactaggctggcctcaaactcccacatactgcctctgccttctcagtattgggatgactggcgtgtgactctgatcagcccgatgacattttagtacaactgattgccacaattgttttagaatgagactgggactcattgaaggagctagttagtgtcctagaagagctcacggcttagtaaatgatgagtagttacccaagtaaccagtctgcctgggggtcaggtaggattctataatgtaggctctagagcaagggtagtaagactggggtgcattcagtacagggagtagggagtgctggccaccctagcttagggactagtttagagttaaagaagaggtatattggggtgatctaggatccagcttgggtgaaagttggtgtggactggattagagtgaacatcttgggagttgatacagcaaaaggcaggttcagatcccaggaggcctgcagtgccatgatactaaggagtctggattctgtcttataaataataggttttcatggctggagagatggctcaatggttaagagcactgactgctcttcaaattgaatttctgagttcaattcccagcaaccacatggtggctcacaaccatctgtgatggggtctgatgccctcttctggtgtgtctaaagagagcaatgataaatacataaaaataagtaaatcttttttttttaaagtaggtttttaattaggcaagtgtttgttagtagcaccacactcccctgcagcagctccagggtcccttaatctttcagggaccttaactcagggaaactcaggattcttggctttgacatagaaaagagttttgaggtgagccagtgtgaaacagagatgggttttatctaaagtagaaggaccgtgggaactgctgctcagagaggagtcacagcttagtaaaagattttttaacctagacttttaagtgtggggattaagagaaaaacgagttactttcaagaggttgcaaagaagcccctcctctcctggctttatagatgacaccgggctgtctctggagataccttggatggaactgtaatctgagaaggtaaacccaggagttactgggagcacacagggactgacactttcttcttcccttcccttcccttcccttcccttcccttcccttcccttcccttcccttcccttcccttcccttcccttctatcctccccctcccctctttcattccccccccttttttttttcctgagacaaggtctcactcactatatagctttgactaccttggaacttgttatgtagaccaggttgatccccaactcatagaaatccacctgtcaggctggagagatggctcagtggttgagagcaccgactgttcttccataggacctgagttaattaattaattaattaattgattaatttttgttttgttgagacatggtttctctgtgtgtagacctggctggaacacctggaacacctgcctctgtctcctgagtgctgggactaaaggcgtgcgccaccaccacctgacccacacctctttttattataaatagtttttggttagatttctagaaaatggcaagtgaacagtcattggaaggagaaaggcctgaagcaaatgctagtcctgcggagttcttggttttcaagcaatgccaggctttgattcaaccacactccaaagcgaagcctccctttccttcccaggtctccctacttttctgtccttttcagattgtggggttggaggcaggaggggcagagtctgtttccacagctcctgtggcttgggctgagtcctgaagtagaacaggggtgtggtgttggagggggtgaggctgactctcagggcctatccaggagagcaagggggagggcctggcttggggcagaggtgtgggagaaggatggctatgcagtggtaattctggttccctttccactcaggtgggtggagatggggcatgcatgcgagcagaagaaaggcccatccccattcctattgggtgggtgcttatgtggggaaggaagggggggggagggggttgtctgtaaactggtaatgcagctgagtggaaggagacagccccagctgctatcagcccagctcaggttaacaagtcacctcccatcactgagatgctgggtgtagaatgtcttttggaatcctagctagtcgtggattgtagctttctcagcagaactttccttggtgtcccccacccctccacagacttgggcacctccctcccctcttttcactgcttacatgggcaggtggcatctctccaggtggtgtctgccttcttggttctctgccttgggtctattgctaattgtctatagcaagaatctgatactgtgactcccaagagactcttgtgtttccatctttcggtctatggacagttagttcccctgacctgcccctctggggcccagtagtgcatcttgactggagtcacattcactaccacacctcactaccacacctcaattgaggttcaggcccagaggaagacaggaggagaaaaccctttgttagcagctctgttaaaactccttctccatccctgggctcaatgagtctgggttccctcacacttcaccagatttctgtgccactgtggccagacagccatgttggtgaagtcatcatagctctcggaagggactcgaggtgtgggatccttgggagctcctaatgctatcgtaagccttaaactctttacttaaatacctaaagatcctgtagtatgtgtgtgtgtgtgtgtgtgtgtgtgtgtgtgtgtgtgtatatagccaatgctttctcgatgtgttcaccttggccttgatcatatactggcacttgtatagggcctacgtatttaaattatctctgtaaatgatgccctttgtatgttaattgggtcgtatggtaactaataagtggtgcagtcttgtcttgggtgggaagagctagggatgggaaactcctcctctctaggcggggctctggagggtgggactgggtgtggcaggatgccaggtggcactggggacagagaaagagggtatctcactgggagaagggtgaagtttttcatttacaggatgaataaaggttaacagggtttggtgtgaagggagttcagtatggacggtcagcagggtgtggttttgaaggtgtgtcctgtcccagaggaaagggaggtcaggacttggattccagactgagaccttgggaagggcagtgacttagagttcttgctccttaatcctttgggccttggttattttgggggtgggggtgggggttggatcttaatgggtagcaagcagtttgaaatgcatgccgtgtctataaattctttccagtttttgacatctgtcatctagaaggtgacatttgaacaagacttcttcagaggttcagaggtggaattttagtagacagtgtgggagctcagatcccacaggcgtggtgaaaatgaagccatagttggtgtgtgtctgtctgtgacagagagcactggagaactggcagagattggctagattttggtaggccttagccagcttagctgaggtttttgttgttgttgctgttttttttttttcccccttccccaagtggaaagatatgtgagcctttctgcatctgaggatttttgcctttttaggggcagagtatatggggctttttagtttagtttagtttttttttttttttttttttttttttttttgagacagggtgtccctgtatagccctggctgccccagaactctggaactcactccatagaccaggctggccttgaactgggatatccaccagcctgtgccagtgctggggttaaaggcattcaccaccacacctatgtggggccttttatgtttgttttgagtcagcactccggtagatactgttagccttctacagcgttattacagaatgtgttttcttgcaccaagacattaactgaagattctttataaaatccagagacagtcagcagtggtggcggcacctcagagcagaagtgtaaggaattaaagagcaggctagcactgtaagagcactctgagcagtcgagtggtttatccttagtgaatgcagggttctgggatatactcagaactcagtacttcagcaatgtacccaaggtctcacaccagggaggacagtcccagagcccagctgctgctccatgctgtcggaagccagcgctgctcacacggatgccagcagggctcagtcactgagcagctggcagacttgtctgcgctgagtggtctgtgggtttctaggcagggctttgagatcagacctcactgtcttcttccaggactccttccttccttcctagtcagcctcatcttgcttaccgtgtgagaatctgagggtagtttcctgggtgctcagtgaccgagtcagtggggggaaaggagaaatgtttcttggctggcccgcctgccaatgcagcagggactcttctggctctgtcccagagactaaggatcaggtgacgaaacagccagagcacttcctcagatgtggtagtccttgctcactaactacccccaggtagtagtcctgggctgtggattgtacctaggaaatgggatggaggactgggaaaatgaaagtaaaggagacagcggttgcttcctgttttcaaaacaaaacccgaagggcagtgcaggagggggaaggaggtccccagtgtcaaaggagcctttgctcatgcaggagcacacatctctagtgccagctactctgagggccttgaggtgggagcatcctttgtgcccaggaaccccaggctaggttagcctgggcagcagagtgagtccctgtacatcttagaaagctaaaggaagtggttggttggtgaaaggtcacagcgttgttggaggctaagagggttcattctaaattcagtgccttttgaaataggtcagggacctgtgaactctctggaaggcctaatgcaggccacgttagccacccctgtcttgtctattttgtaagtaaagttttatggaaatacaaccatggccatttgtctagatactgtctgtagctacttttgcactatacgtgagtagcagggacatgggtcatgtggtagtcagtacttaaggactcgtaggtcctctggtggcccttgcactgggtgatctctagggctatagtttattcatatatgaatattgtggggcctatgaaagatttgcttccttccttccctattagatattatgaaccttgttaaagctagtctgtttgccacttcctgtgaagtggcgtgtgcaaagctggaggcgggtgaaagcagggtttgaattcctgcttcttgtacagcattgggtaagttacttaatctctctgtgtcttcatcttaaggacaaacagttcatcctgcctagtaagattgctgtgacggtgtacagtctaagcagagccccagtgttggggcattggtgctggctcctggtgctgtcatccagagcagctcttagtcattgttctcccagaccctgcatggcagtcctccactggagggagtcccttaggacaaggcagtttcctattaggttaattcccaggactccagctggataaatggtgcagatttatagtccgtaagcttttctaagggagaaaaatgaactcaaagggccatccatctgttctagcttgtccgccacggactagtgttagcatttgtccacgggggaggtggcattcattcttccactgacgctgacggattgatggtggtgtaacctctggttgctctggaccttgtgtttgtgtagccccactttccattggtggaagtctgtgttcttacggggttttcatgcagcaaacgtgtaagggactaggatgtgggaaaggcgtgtttatgtatgcttactgtctcccactgttagtgagacagtaacctctggagcgaagagattcccttcttacagttctagagtctgagactgaagatcgagatgtcacatctggtgaggaccttcctgctgtggcttaacatggcctatggcatcatgtagggaaagaacatagagggggagagaaagcgtgaactcacttgaaccaattttctcatgttttttttttttttttttagatttatttattattatatgtaagtacactgtagctgtcttcattatatgtaagtacactgtagctgtcctcagacacaccagaagagggcatcagatctcattacgggtggctgtgagccaccatgtggttgctgggatttgaacttcggaccttcggaagagcagtcgggtgctcttacccactgagccatcacaccagccccaattttctcatgttttaaaccacgcagggttttgaactcagggcctcatgtatgcaaggcaagcacaccacataccaactaagccacatcctcagactaataaccctgtcttacaatgccaggaagtaaccctctccaacattaacccatcattagttgacattaatccattcatgagggttttgttcttgtcttagtgttccattgctgtgaagagacaccatgaccaaagcaacctatgaaaggaagcatttaactgggagcttgcttactgctttagagggttaatctgcaggctcgaggtggagggagaggtgggggacctggcatgggccttgaaacctgatcagagcccacctccagtgacacactccctccaacaaggctgcctcctaatccttcccaaatagctccactaactggggaccaagcactcaaatatgagcctgtggaggccattttcattcaaaccagcagtcctgaatttgtaatcacttcctaaagctctgtctctcaaggcaatttgagtagagactaagcttccagcggctggctctggagagccatctccatcggtggcggttactgtataagagggtaaaggagctaggtgacagtgtgtaaggactcctgggcactggagggcagtttgggtccttgctctgctctaaagccacacatcaagctagactgtactttctaaaatggaagtccgttctcacctacttcctaaaatcttgtctgggcttcttattgcctttgaggtaaaagcatgtggtcattttgtcatggtggctcagtggttctcacacttgaatctgcttaaagtctccttgctgggggagcaggtggcttgttaagatgggcatccttgggttttcctaccagtgagtctaatgcagtgtgtctggtgcaagtcctaggtgcttgggttgctgcgtggtggacttcttgcttcagcctttccagagtgcttattgctccatgtctcatgccccaaggggccttcctcaagtccacctgtttcctttgcagttcccacacaggttaaggagtctttcatccctggtcaatccctgcagatgctagccctctcacagcttcccctgctggcccatagccatgtagcagtcttggctgctccaaaagagaaagattctccctttgacccacttgttgggaggcccagcctgcacgagatggaggtgtcctggggttcggccggaactgaggtctttcttcccaattcctaacagcatggtgtatcctctcagccaggaaagagaaatttccttcctagagtcagacttttctgttgctgtgataaaaatacccgacagacagacagacaccttaagggaggaaggatttgcttggttagctgtttgagaaggtcattctcttgtcatttggctttgggtctcagggcctcctctagtgagggaggcacatgttatggccgagggaaagtgttgcagtctcctggggtctagaatggtggatcgctcccagcagcatccccggtcacgtctccttcttctaattttcactgcctccccataacatcttctttgtctgactccgtaaaggatcgacccattgattaggtcagatccataggatccaaatgcttcccaaatgctcagcagccagaagccaagccctgaaaagcgaggctgtggagacatttcgcatttaaaccctaatacctgagtgaccatcagcgtcagctcagtgcacgcgttcttaacccacattcaccagacaggcctgcagtctcagcactcgggaggggagacaggaggataaagtgttcaagtcatcctcagctaccacacagtttaaggacagcctgggttacatgagaacaagcaaacccgccgtccgtccatccacctagctttcttgagctgtgatttacacaccataaacttggctccttccctccctcctcatggtgtagaaatctgacctgacttccccagcggtagctcactcctttttatgtccctctgcttgctgtgtgccatgctggtgcttcagtcagtgtcaggcgttggcaccgacttgactgcactcctgggtaggacgcaggcgttagtcttgctgtctgtataagggctctcctgtggtggtgaaaattgtgtagagtggaataggcagtagttagcagtactggaaacagtactgcagctagccacgttgaccatgttggcctcccatattcatttgctggtagtaattttaagatgtgctttgaggaggaaaggtttttgattttaaacttaaaggtagtaatggtccctttggaaagctggctcatgctggttaatttataccggttaggtcggctgggaagagggaagaaagtgtcagttaagaaaactgcctccgctagattgttctgtacgaaagtctggggtgcattttcctgattaatgattgaaatgggagtgcccagcccactgggggccgtgccactcctgagcaggtggttctgggttgtatatgaaagcaggctgagcaagcctcgaatggtcttggcttcagttcctgcttcgacgtcgctcagtgatgggccattacctcaaagctaacataaagccgttccttctctctgggttagtcagtgttttatcaatgcctttgaggtaaagcatggtcatcaagccagggaagccagggaaaggcctgctaagtcctttcctaactcacagagcttgactcctgggtaggtacggagcagtcacaggacgcgcccgactgctttggcacagtgaagctgttagaggcgctgtgaatccccagccactccagccgatctcatatcagtcacacacatggattgcttgccatgaattttcaaggtagactgaaggaaaagagactttcccatttctcctgtcattcttcagtctgagtatgaagtcagtctgcactggggttgtattgtactaggatggacatttaagaattgctatttcagttgatggctttagtttcttttttttttttttttttttaaaaaacttacttatttatgctctatcagcatgtacacctgcatgccagaggaaggcatcagatcttaggatagatggatggatgtgagccctaggtgcttgctgggaattgaactcagggcctctggaagagcagacagcactcttaacctctgagccaatgactgttgtaaaatcaaaatatttaactctgaaaaatgctgaagctgtttagtaccctgcagtatcaaatcttcaggcaacatttaattctttatagaaagataaacagatcctccttactcgtgtgaaaattcgttttttaagtgtgtgagtgttctgtctgaatgtatgcctgatgcccttagagtccagaagagcttccgatcccttggaactggagttttagttggttgtgagccaccgtgtgggtgctgggtattgaacctgggtcctttgcaagaggaacaactcttcttaatgctgagccactctccaggcccctcgtctgtaacacataggaaaaggagaggtatgctaaagagttgtctttaaacacattttaaaaaattatttattatcaattttttttttgtttttgtttttttcaagacagggtttctctgtatagcccaggctgtcctggaacttactttgtagacctagctggcctcgaactcagaaatctgcctgcctctgggattaaaggtgtgcgccaccacacctggctatttattgtcaattaatgtttaatttatattcctattttgcatacctgtccatttgacgttgcataatcatttcttgggcaaaaagaggtcagagaaaatttaagaagtctcccatttgaaagcccacaagcccagttgtctgtatatcacatgacagtaggttagatgtgactattttaaggttgtttaaagaactcttgtccatgtatgtgctgaagactacaaagccctggctttcaggggaggtcactggagactgtcatccatttgtaatcttctgaagcaaacaaaaggctttgcagatggatttaaaatagcactgcatccccaaaggcctggcgtcggacttcatcctcccttcccacctcagtcaccctttctctgccgtcagccacggctgtggagtctagctccatcttggtctcctttgctctcactgtggcctccatgtaagaccctatacaacggtcttccacggcgccacccccgggagagcaccctgtaggtgtccttgcctcttctttgacctctgtgatctgctcggggttctgtgtccccaccgatctttctcagacactgattacatgtttcttctcctcagtgtacagacttgcagtggctgtccatagtaattagaagaaaaccactctccttgtgaccaaatagttgagctttttgcctccctccagctgtgtcttgccttctctgccgattttgcctctcagtgccaagttattctctaccatagagctcttgtgtatgtgtttcctgtctggctgactcactggtcaccagttcctgaacttcccaaactcaccacagaggtcaaatttccaaagagactgtgctggctagttttacgtcaacatgggcacaaagctagagtcatcagagaggagggagcctcagttgaggaaatgtcttcatgagatccagctataggcaaggctgtagggcattttcgtaattagtgattgaaggcccacttctttgtgggtggtaacacccctgggctggtggccctgggttctctaagaaagcaagctgagtaagccatggggagcaaaccagcaagcagcatcctccatgacctctgcatcagctcctgcctctaggttcctggcctgtttgtgttcctgtcctgattttcttcaatgattgactataatgtagaagtgtaaaccaaatagaccatttcctctccaactttccttttggttatggtgtttgatcacagcagtgatcaccctaactaagacagcttagcttagcttggctcctatccgggcctttactgcagagcctttttgctttctcctagctgtgggtattatctgcacaatcttgtttgtttatatccttttttgttatctgtcttctatctaattttcattgcaggaaacagcagttgctgtaggcagtttaaagaggaaatcaggtccttggaaggactatagagtgtttgatctaggctcctgttcatgtatgacccccgagtcctatctagaaatgacccacttagggaagaccctggtgctctgggctcttgtcagttcgctctccatcgctgttacttaagggaggaaatgtttgttttggtttccttctgtggtcagctggccccatgccagacagaacattccagtgggaaggtgtactggagcaacgctgctgctctagtggagaccaggaagagagaaagagagaagacagacaggttccaatatcccctccaagggcacgttcccttcaaagctcttacaggccccgccacagctcagtagttagtacgtaagcactagcacactgccagcgaggaccaaaacttcaacccaggagcctccctctgggtctatttaaggtaaaccatgactagggctaagccttcatggcgctctgtgttctgaaggagcctgtgtttgttttgttttattttgttttcactgtttactctggctagcctagacacttagggtcctccttctcctagtccccactgtatgcatgcactggtgaatctgagcaggcggaacctaatctacacccaggcatttggaggagttgagagattaggtaatggctaagtggtgaagtcagcttcagacagcagcaaaccaaacacactgctaaagtccctttgagagtgtacattggtgtgtcagctatgagagccgggactgggcgaataaagtaaagatacacctcagagtcacagggtagcaattctgacccaggaattattttcattttttccctttttttattagatattttcttcatttacattttaaatgctatcccaaaagtcctctattacccctccccccccccccattcccttgtactggggcatatcaagggcctatcctcccattgatggccaactaggccatcctctgctacatatgcagctagagacacaagctctggagggggggggggtactggttagttcatattgttgttcctcctatagggttgtcgacccctttagctccttgggtactttctctagcttcttcctgacccaggaattcttgtagcaaactagcaccaagcgttagaattttctcaagagggaaggttgtgagaatttacaagttatctggaccgtatttgggacagtttgggtatcacaatggttataataccctaggtgtattgtagaacattgaaaacagtcggggtctttgagtctatgctgatggcagataaacaaacagcttgctgaggtagaatacgcgaggcaggctgacggaggccttgctgctgcctgtgttaggaggctgttgctagattgcttcaggagcctgctatggtggctgatggttgcctgggatctcagagctttagaggccaagtcaggatggcactgtcctaggtgctgagtctaggggctcacttgcctgatgagtgtggtagtcttgtgagctcatgtgcttgtctgcaaacacactttttacattaataagttaactaataagttagttagatcatcgtgcgcgtatttgaggaagtcagaggacagtgggagtcagttctgttctttcaccatctggattccactggttacactcagatctgcaggtgtggtgcggagcacccttagctgttgagccatcttgctggccctcaccttaaacatcttagtaactgccaaacagaaatagtcacagtgcagtggagaaacgggctgctgtgttaggtgattacaatcaacaccactggagggacagatgccctgagaaggatattggacccctgctgtagtggggtagtatctactcatataaacctcagagtcacagggccagagtttcgacccaggaatttgtatggtgagcaagcaccaagcgttagaattttctcaagagggaaggttgtaagaatttacaagttatctgggccatatttgggacagtttgagtaccacaatggttaaggacactaagttgattatagaacattgaaatcagttggggtctttgggttcatgctgatgaaagactcactgtcttgtgagtctttagtgctgcatgctgtaaagaggagagaagaataggaagttgacaggaagataatggtataaacattccaggttaatgaaggcaggggaggtgtgacagctgagtgcagtagcaggcgctagcccagagtctgtactgcagaattaaaaagtgctgcggagacggggcagctgacacatggcatgaagtgtagtctaacttagagaaccaggctgcctaagaggtaaacacaggctgcggtatgtagaccacactgacccagaagcgcgtcacaccttacagtccgatgccttagaaaaataaactgtgtggatagctagacagcaagcaagggaaggaggtgttgggagagaaggaagagcaggtcatgaaaccggagtggcaaagtggcaaagacaggagaatttgtctaagtggcacacaggcatgctgtgctagtaacctggcgactagtatgtcagtttgcagttctttccaaataatgttttttttttttttttttttatgtttgttggtttgtttttgttttaagttgccagaatgaaaaggaacagagtgagtgtcagtgttctttggctttactgtgcccgtgtgtgctggagctgcttcttaaagaaacagcgttcctttttatagtatccagattgttcatgctctgtgtcagagatataggcatgcttgttgtaagctttaaaccattcagaagttaacatgatctttctctttaccattcattcctgcctatgtcagaaggaacccactgtgcctcctattatcattcattaccatactcacgggtccgccttagggatatagaatgccgtgctgtctcgtccagaactgggacttacacttaatatgtcttagaaatagttctactcttattttttatgtaacaactgaagagaactgagtgacatcatagtgccatagtttatctgtggaagatcacttgatctgttttcttttatattttaatttctattgactatttgggattctcacagttctcccagtcctcccctgtctgcactctcccattaagctccaccccagtcaaaaaaaaaaaaaaagggaaaaaagttccttttgtgttgttcatatacttactccctggagcatgatcagatccccagagaggatgagtctttctctgcctgcatcagtaccagaagccatggactgaggagagccatgggcagccagagagggacagggctagctctcccaccccacactcccgagctaactcgcttgatctgctttcccccctaagactatgtatgctaacagagggatccttatgtatgaatatttttattttacacacgcacacccttgtgtgtgtgcacatatgcatgctcatgtgggcaccttcatgctatggcatgattgtggaggtcagaggacaacttactggaatctctttaccatatggggcctgggaattgaactcagaattggcagcaaataacctttacccactgagccatattttaatagtatggaattgaaatattattattatttttttaaagatttatttatttattttatgcatatgaatataccaccattgctctattcagatataccagaagagggaatcagaccccatcacagatggttgtgagccaccatgtggttgctgggaattgaactcaagacctctggaagagcagtcagtgctcttaactgctgagccatttctcctgcctgagttgacacaatattgcggtgtgaactctgttccttttaatttaaaaatactcctatcagtgatagtttcaaaatcagatagtttaaaacactaagtcttttggttctgcttgttctctgtgtaaaattattcccgagacccccactcccaaacaaagagtaggccctcgccttctgtgaacttctgggtaggtatggcactggaagacaggggtgtggatataataagtaatttgcaaggtttactttacagtcataaagacattagccaagccgggtggtggtggcacatgccttttatcaggtcactgagtttgaggcctgtttggtctacatgagggagttccaggacagccaaagctatacacaaagaaaccttgtctcgaaaaacaaaacaagggctggtgagatggctcagtgggtaagagcacccgactgctcttccgtaggtccagagttcaaatcccagcaaccacatggtggctcacaaccatctgtaacgagatctgattccctcttctggagtgtctgaagacagctacaatgtacttacatataataaataaataaatcttaaaaaaaaaaaaaaaagaaaaacaaaacaaaacaaagatttagccaagtaatatcaatgaaaatgaaataatttgctcatctatgctaaataaatccagtatatacagctgtaaaagagttgccttttcaaatgcactttattatcttctatgcactgcagtgcacatcttttagaatatcttttctacaccctctgacaatttatatgcagccatagtggctcttgatcacctcccctcccaaatgtagagcacatttcatgtccatacatactcactgctctgtggagtcacgctatgtgctgtttggcaacctagagtatttgttttgtagtaattttgattgtgggtgattagtttattttttattttaaaggtcttagaacttctcccttatgctacagcttctcctcatacggttagctttcacttttaaaaacactgatctgtgggtaatgggagctaacggcttgaggttaagcttttcttgagagcgacacctggtggttggtttataatctcttcccttccccgtgcttgcaggaaattccgaagaatctttctgtgaacagctccctttcttggtagacacaacagccgctatgcaggctcaggttggtgccactgaagcccacacactcccagaagcctggagatttgattgcatgttcaaggaggctctttttatttttttaatttttaattttttaaatttgatgtaattcaaagagtttatgactttgaccgtgtgccagcctctctgctttactcttgaggaggctggatcctaaaaagattgcatgtgtcagtcaaggtcacactgctcactggcggcctgaggtcctgtgactctgtgctcaggagttaggctttccatgctgaagtcaactgtggatttttttttttcttctctgttccaggagaggctcagagtcttgggtaggatgaggggttctagctctgtcttcaggagtcagctgactcatctcatttctgaggatgaatatcccatgtccctgtattggtggagcctgttctgagtcaggcctgttctctatgcactgcgtcgccaaaatcctcacaggacttctgggaatgggatgagattcccggcatagcaacaggaaatggaggattaaagggctagacttgcttcaggtcagggttcacaccgagacaggcctatctcccaagctaacttgtattttctccatgctctactgacaaaagaagtaagtcattaatgcataattacttatagtgctcagagacaaacctgcccccatgggtgttagagcatgtgacccataaattttccacagagccctgtaggaggctgggaggttgggtgggtggggctcatgccatcacgttgtgattaccccagtaggcacccagtgccctcggctctctgtaggtattgtaactgtccaccaatgttcccaggttacaaatgctaacactgggatgggtggaaagggtttgctacagcgaaggaaaagggaaaaggaggggctaagactgtgtggacctttctatcctgaagtgatggacctcggtgtggtggcaccgcacttgacacacaccttcctccagggtcattaggacctccaagccaccgtccaaagggccgctctgtacgctcatcaagtgccagctccgtgccgtggacaggcagcacggtttctcacgtgtgagagggaaaggcattttttgtcctttgacttcgttttaaaaaatgaagatcttcacgatattgtgagtgagtcatgtctaggctgcttcagtgactgaatcatctgaatagaatgcagctcatcagaatgaagcttaggaaaaatgaactcatttgattgagacagggtctctctgcagagccctggctgtctgttctcgctatgtagaccaggttggcttgggacttagagatccaactgcctctgcctcctgagtgctgggattaaatgcatacgccaccacgtctgtccatggttcctccaattcacggaagtgctcaattgaatcattcccacagggatgacttaacctacaatcccaggctttcatatctgtgggtttaaaaaactgtatgttatttgtaaaaatgaagctttaagcctcaaaaggctttcgcccaatgcttgtagtcacagcacttaggagagtgaagggatgggcctggtgggcaggtcctttgagctccagggttccagatctgcctagacaatgcagtgaaaggttgtctgaaggaaacaaacaaagaagccagacatagtggcttttaatttctgagtttgaagctagcctggtctgcacagtaaaattttaggtcagccagggtgaaaccttgtctaaaattcaaaccaagccaattccacagaacttccataggtaacaagagagcactttccggagggtaactagagaacaaagcagtaaggtcacctttgaagaatgtgtgaaattatattcagttaaaaatagccaaggcagcctctgtcttcagttagtgatgttactgttacacgattagaactctgttttaaagagcgttttggtgttttgaggtaggtctttgcagcccatttaggccttgaatcttcagtcttcctacctcagtctcttgagtgctaggattagaaatgtctgccaacacatgtgaatttaaaattgtctgaagcccattttattaaccgaaagatcacccccccacacacacacacaaatgaaagttggatttaaagaccttggttagagatcaactgtgctgcgcctttttcttcgttttcttcctgttagtctgctctaattgagacgtttgtagcccttgagacctggagaaggttgtgttttgttttgttttttttttttttttttttttttgtatttttttttccattttttattaggtatttagctcatttacatttccaatgctataccaaaagtcccccttacccacccacccccactcccctacccacccactcccccccggttgtgttttgttaactgccagacctagcagtagttaccggtggggatctggaggtggtctctgcagaattagcttttatagcttctgacgaagagccccgtggttcagtttaggttcacataggacttgctttgattttctttttcttttatttattttctgagacagaattttgcgatgtaggtctgactgacctaaaactcgattatataataatgttcttacattagataatagaatttaagatgactcagaagaaaagcagagaacagttttgttgaagtttgagagggaaaacaaacaaacaaaaacaaacagcaaaaaacagggcaggcaggctgccagtcgggagtaggtgggtaagaagaaagtcaagccgtttgaattaaggccagagaagctgggaagctggcaggcattaatggaagaatagagttgctgtgtgtgttcagagagtgggatgcctagagcatcagtcaagctgatttaggatctttggctggtatctggaaaggagacggaaggaagaagctatggttgtgagatagaacttggagcctcaggcaggcttagtgagcagtggacggctgttgtagccacctagagacatgctacttgctctgaaagtacacacctcactgagaggacagctgttactcccattaaaaaaagcttttttttaaaaggcttatttttatttatgtatctctctgggtccatggtgcccacagaggctctaagagggtgttggaacagttggagccggagttacaggtggttgtgagctccctgatgctgatgctgagaacagaactcaggtcctcggcaggagtggcaccgaaggatgctcctgacagctgagcatctctccgactccacagtcatcttttaatatcttttaggagtattggacagattgccaagtgatggatagacccacatgggttaggccttcaagggaaggagaaatagtatttctttgtgaccttatactacctgggtggtatgctgccacccaggctagaggtacaactcaggtcccattcttttcagcaaaagtcacagaacagagctgattaaagcgaatgaaagcagaacaaaaggaaatataggcatgggttaccaggaggagtggtcttctcttcgtaggcgtccacttgcctcatacctccattgccgttgtcactgtgttgctgtgtatgagtccagccagtgccggggtgtgtgtcagggcagggtgccagagaacaacttcagagttttttttctctcctgtcttttgtgggttctggggattgaacccaagttgtgaggcttgtgtggtaagctcagtcggggtcctaccccaccagttaccagctgccagtccctggtgtttctgaccttaatgcaaggcagtgcgtttcctgctttcacatggtattttatttttattttttatttttttaaaagatttatttatttattatatgtaagtacactgtagctgtcttcagacactccagaagagggtctcaggtctcattacagatggttgtgagccaccatgtggttgctgggatttgaactctggaccttcgtaagaacagtcgggtgctcttacccactgagccatctcaccagcccctcacatggtattttaaatcccaaggactgcaactgtgatattttctccttcttataattagttatttgctaggtaaacaaggaagatgattatagattataagtattgtggacgaaataagtcagttgatgagaaattataagttgctattcttggtgactttaattagtgtgatcaaagtcctaaccttgaggaaatgacattcggtggtaaaaccaagtggtggggatcagcctgggccggagagggccacactgctgggagacacacatgagcatggcgtgttagaggagcagaaaagaaagctctgtggctgaagaggaatgggtgaggggcaggctggaggtgtgcttcgaggcaggtggacaggactttcatgactgcggcaaggagctgggccagggcaaaggagctagagtagggcaggggtgtgtgcgtctactgaaagggaaaagagggtggatggctcgatggaagaaagagagcacatgtgtgtggtctgtatgtgtctgagtgtggagtgtgttgtgcatgtgagatagggagggggagaggaaggagggagggaaggagagagagaatatgaatattctggctagttttcttttctttttcttttttttttaaagatttatttattattttatgtatgtgagtacaccatcactgtcttcagacacaccagaagaatcccattgcagatagttgtgagccgtcatgtggttgctgggaattgaactcatgacctctggaagagcagtcagtggtcttcactgctgagccatctctttagccctgagcattttcttaattagtgattgatggaggagggcccagcccattgtaagtggtattatccctggggtggtggtcctgggttcaataagaaagcaggctgagcaagccatggggagcaagccagtaggcagcacccctccacggccactgtgtcagctcctgcttcctagttcctggcttgtgtgagttcctgtcctgatttccttcagtgatgaacagcagaaaagaaggctctgtggctgaagaggaatgggtcactatacggaagtgtcagctgaataatccatttcctctccaagttgctttggtcatggtgttttatcacagcgatagtgaccctaactaggacagaagatgctgatgcctttgagcaggctactggcatgcagcacagcatggtggtgggctaagcctagctcgggaccataggattggttggtaggtttgagataaaggcgggagaaagtgaagactgatgtgggcatgtcctgctactcttggggtgttctctgtcggggtgaatgaaacggagcagtgaaagctgctcaggctgaattctctgccgcagtagaagcagaaggaaatcgtgcttcgattcacagagctcttctgtgggtgtattccactaggattgttactgcccgccccatcctttcccaccccactccctaattcgtagactcatcctttttctccattcttgagaaactcactgtatgttttcttcttttccaggatatctttgaagatgccttggagaccatctctaggtaagtcataacataataaaaaaagtgaagccgggcagtggttgtccatgcccttaatccctgcactcgcagaggcaggtggatctctgagttcaaggtcagcctggtctacatagggagttcctggacagaaagggctacatagagaaagcttctctagataaacaaaaacaaaaaacaaacaaaactgtgggtcatagtgagaagctggtgattcttgtgtataaaatgtcagtatttcattctcagtgttttgagcgtagtggccactgtctggaaaacatcacaagtctataacgaaaacgttaggatgtaattacacttaggatctaccaaacattctcaaccatgtttaattcttgcattgttaaataaaagaatgctctccagcaaattactttgtttatagccaatgttctaagcatttgtccatattatttacgcgattagctttattatagagtgttgcttttccttagtatttaattttaagcctgagtggttttgtaataatttaagatgactgaatagtattagatcaagtaggttactgtagctagctaccactccattgttagattcaagctgttaccagtcttaatttttaaaaaaagttttgtagctaggaggtcgtggcacaggatattagtcctagcgcttgggaggcagaggcagacgaatctctgagtttgaggttagcctggtctacatacggattgagttccaggatggccagggttgcacggagaaactgtcttaaaaagccaaacaaacacgaaaacccctccagtgttaaagaggacactgaatcctctggaactggagttagggatagttttgagtggcagtgtgggtgttgggagttgaatctgggtcttctgcaagagcaacaagcgctcttaaccacagagccatctttccagcactagaaaaggtttaagagatgtatgttttcatatatataactttgtaacatgtttgagttgtttatgtttgattgtttggaaataattaagaacttggctataggattgttggtttaaaaggggtgaatggatatgtttattgctctttacatatcctgaaatgccagtctgtggtaattagcttgagcttcgtaacagaatgtaatatagcccactgcatggcttaagcaacagaaacttacagtctcggtgttttgaaccttgggagtctgagataaaggtgccagcgtgactgggttctagtgaggccacgctgtctcccacttgtacaggtttgtcttgctctgtcttcacatgatggagcactgttcttgggagtcaccagtctcattgtgagtgcctcactcctttgaacttgaaccatctcccatcttaactcttaccacacggagggtgaggccttccctgggagaggacacatacttcagtccctagcactttcaaaaaagtttcttctgtttatgtggtaccagtcctacgtgagtgatgcaggcttcaggatcaccaccccagagtgtgacccaaagattagtcacactgtcctggttagagagttgctattactgtcatgaaacaccatgagcaacgcaacttgtaggggaaagggtttatttcagctaaggtccattactgagggaggtcaggacaggaactcaaatgcagcaggaaccttgaggcaggaactgacccaggacatggagggatgcttgcttactgccttgctccccatagcttgctctgcctgctttcttatagaacccaggacgacctgcccagggatggcaccacccacagtgggctgggccctcccccatcaatcactaattaagaaaatgccttataggcttgtctacagcctagtactatggaggcgttttctcagttgaggtttcccccttttagatgactctagcttctgccaggtggacctaaagtttgccatcatccatcctttaatgatacctgtttagtgcttgagtataagacatttacgtgccttgtttgaatctgtttacttttgttgtcattactgtttagagacagagccttgtctgggcctggctggcctctaaatcttggtctttctgtctcatcctcttgagtgctgggattacaggcatttccaccaacttggacatctattatgttcttatggatcttcagttatatgcatcctaatcttccatttgctatagtgtgcttaatacttttgtgttggaactgtaaatgtttattttgtccacaggttttaatgttttcttttttttttttttgttgttgttgttgattgcccatgagtctaaaacacaaacaaaaacaaaagaacagaaaaagccacgttttcattaggaatggcttcagatttgaggatttcctgtgaaaggagcaaagagagctcccgtgcaccctgcactggcttcccttatcagtcatttattaaccgctgcattatatttctcacactgagtaacatggaccatgctagaattccaatcgggagtgttccctacacggcttatgatgtgggcattgtcctcagcctggttctcttgccaagaactgggaaattttaagagctggggcacagtaagtaggcttcaggtcattggcagtatactgatgaaggaaattaggggactccaacctccccctttcgtttttgcctcccatctcctttgccctgcacttctgcccagatgtactgctttgccacagacctcaaggtgatgaggttgaccagctgtgaagtaagcctgaaaagtgtgagcccaaataccctttccttatctgaagccgcctgagtgtcagcatttgttacagcagcaggaagccaatactgatcacttatgctaactgcggtctgtccattgttcttatttattcagatttcacttagggtcccttctttctcttatcatcccaactatcataccatgctgtatttagacagcgtttctccttaggctattctagtactgtctgtctaatctaatctaatctaatctaatctaatctaatctaatctatttttgagaaaagatctcaccatgtagtcttggctggtctgatgaaaagtagtggcacgtggactatattgtttgagtaaatttaaattattcatgagttttgtgattggcatggcatgaggaggcaagcttttagggcgatatggtcagtcagaccatctcataacttgtagagatctgctatgtgtgttacacacagctccccacgagctctcttgtgagattctatttcttggttgaaccatttgacatgtgttccatggttcactcacgacaagccattctttcccagtctgtgcacatactcttatggtggtacatgaaatagtttgttcataaatgaccttgacacagcataggaagagtaccaaaaatgctttgaactgggaatgtggcccagttgagaagagtatgcttaggacatgtaaagccttgagttttatcctcacagtcagtaaactgagagtggtgatgcaaatttgtaattccagtactcaagaagattaagttcaagatcatccgtggccacgtagcaagcttgaggctagcctgggctacatgaaaagctatcttggaaaaaaaaaagtctttggttctagagagatggttgtgaatagggacatttgccacctaacagtgggtgtagaaaagacatgggactgttgccacagtgctgttgaatggctgcagactcctggggctgagtagtaggggatgggctaggcatttgggagtctctccctttgacagtttggattgactcttcttcataaccacagtggacaatgggacagtcatctttcctcttttcaccgtagttagaaagagtctagggggacacagcacatttgtcttcagactgttagagcggttgtgggattaatgtgttttcagcaatggcttcctctctggtaagagttgaattaaccctgatgtaggagtttataggtgtttaatgggatcccgaggatgcaggaatggtgatggatgtgtcgatacacagagcttctgagagttagccatgcttggagaaggtgaaataggtaggtgtgtttagccaggtgattaggaacttacaatggaaataaatattttgtggacatctttcctttctcacacctgatcttttcaactataatttgtagatgagtatgcaataatgtaaagccattctcccctcatttggtggcaatgtgttattttatctatcttaaggtttttttttttgtttttgttttttttctttttcttttctttttttttaattaggtattttcctcatttacatttccaatgctatcccaaaagtcccccataccctccctcccacccccctacccacccactcccactttttggccctggcgttcccctgtattggggcatataaagtttgcaagtccaatgggcctctctttccagtgatggccgactaggccatcttttgatacatatgcacctagagacaagaactctggggtactggttagttcataatgttgttccacctatagggttgcagttccctttagctccttgggtagtttctctagctcctccattggggaccctgtggtccatccaatagctgactgtgagcatctacttctgtgtttgctaggccccggcgtagtctcactagagacagctatatcagggtccaatcagcacaatcttgctagtgtgtgcaatggtgtcagcgtttggaggctgattatgggatggatccctggatatggcagcctctagatggtccatccttttgtgtctatcttaaggttttaagggtaaaatgttggcaaataactgttagaaagtatttaatattttttcctgttggtttggttcgtcagacactccttcagtgatagtgacctttcagtggtatctgcaaaagtaagcagtgactggaccgcacacagagttcagacaaagggaccaggctcccacggtgcctttagttaccctgtgggtccaacagacaagcaaaagcccgtgtctcttgatctctacatggggaagaggcaaacccatcaaatgcacattatcttgtaaggggcagtgtggtggtttgaatatgcttggcccatgggaagtatcactattaggaggtgtggccttgttggaggaagtgtgttaccatgtaggtgggctttgagtattgtcctatgcttttaagctctgcccagtgcagaagagagtctctttatggctgcctatggatcaagatatagaactcttagcttcttctccagcaccacgacagcctggtgctgccatgctttttgccatgatgataatggactgaacctctgaactgtaatccagccccagttaaatgttgtcctttataaatgctgcattggtcttggagtgtcttctcagcaatgaaaccctaactaagtcaggaagtaaggccatccatgagagtggagtccttacgacctaattgcctcccctgaagcccagcttgctaccctggcatctgaggattaagcttcaacagaggaattttggaggttcacagatactcatgccctgttgagaaaatataccaaaagagaatataaggatttgcacatatttaaaaaactccagccaagagatagttaagttgttaaaaaagtaaactgctcttccagaggacctggtttgcttcccagcctccacatagcagctcaggatcttctttaacttccgtgccaagtgctctaaagccctcttggcttctcaccagacatacatgaagcaaaacacttgtgcatgtaaaagtaaaaaaattcctgccagcactgtgcacttacacaggatacctgctgtgattgttcaaagactgatgaaagaggtctttaaaatatatgcttcttcacaaaatgactcgtgactggctatgtttgtcagctcacatagataatccaacagtgctcaacttaatgatgcaaacactacccagtgctaaaggaattacttctgccatttctcattcattggtggactcagtttttatttgagctttatgtaaattgccagctctttgctggcaggtccagacaagagaagtcttggtcccaccagggctctccagggctgagtgatatggcaagtgtctacagcccaaaagaaacacaccaagccgggagtcttgttgaagcaggaactcgactctatggcatcagcctctcgcttatataagtttggatttttggtggggtaacatgacgtaggaggtggggaagggtgatggagggtatggaatgactgacagggccactggcaaagctttacctcagcaatggcagggcagaggaaggggcaaacaggtcttactgagtcaccctgataagggaagtgattgagactggtcttaaaactcgagccagactcgggttggtcctcaagacccaaaccagggccaaaatggggcccaacataaatggcctgccaattaagtgttagatgagtccattgccttttaacttccactgtcttctggctgccttttcccctgtcatgccatctgttttcttttctacctttgataaaactgtcacctaaaatgactaataaaacatttaaaagcagatacttgagaatttcatcctttgaaatgtgtgtctctctctctattttgagagttaatcagtgcctctctaactcttcctcttccgccttcttctctcattgagctcatcgaatggcatctatagaactcctcaaaggcttagacatcctggaccgagcgacattttactgagtgcaatttagtattgtgtatcatgcacatttaataagtcactaacaaattaggaagcggtggcaggggacttacatggctttcattattgtgcagtcatttccgagctgtgtgttttattttgttgttcagaacggatgtgtaggacagcagttcttagctgtcatcagaacgttctgaccttgcctgcattgctgatggatgcccttccagtgttgtgtcccacgaatgccaggtagaagctttggatatctatctactcaggcggcctcacctgtgcctttgagtacttaacaaaaagttctgcgggtcagccctcccctccgttaagggtcagccctcccatccgttaagggattatttggcatttaaaaactgtgggccaatctaaaaggaaatatgtccagaagaatgtgtgatttggtgtgatttttgtgagaaagttaaatccttgcttagctgtttgaagtgacacctgtgctttcattgtggccttttgtggcatcagtacagtgctatcatttacagacaggttgatcctatattttcaacagaacttattcactaaaaagtacatggatgctttccacttaattccgtgtaagtaagaatacatacgcctttaccctatgaagtaactgaattgtaagtattttgttaacttagatataaaacaagcttcacagataaatgccagtcaacgttcaatagatatctagaaaatactgctggtttttttttttttttggggggggggtggtggtggtggttgagacagcgtttctctgtgtagccctggctatcctggaactcactctgtagaccaggctggcctcgaactcagaaatccgcctgcctctgcctctgcctccggagtgctgggattaaaggtgtgtgccactacgcccggcttgctgtttttatagaacccttataccacccaagatgtgagatattctgattattttcatgcagctgcataatggctttaacattaaaaaactgtttttataaaagaaaaaaaaatcttctacatttaacagacaagagaaaagaactctaatttgcatatttccccatttctgagatgtaccccatcagaccatgggtaagcgaatacctgctttgcatggtgggggtgctggtgccaccttcctgatcctcctcctcctgctcctgctcctcctcctcctgctgctcctcctcctcctcctcctgctgctcctgctcctcctcctcctcctgctcctcctcctgctcctcctcctgctcctcctcctcctgcgaatacctgctttgcatggtgggggtgctggtgccaccttcctgctcctcctcctcctgctcctgctcctcctcctcctgctgctcctcctcctcctcctcctgctgctcctgctcctcctcctcctcctgctcctgctcctcctcctcctgctgctcctgctcctcctgctcctcctcctgctcctcctcctcctcctgctcctcctcctcctcctgctcctgctcctcctgctgctcctcctcctgctcctccttctcctgctcctcctcctcctcctgctcctgctgctcctcctgctgctcctcctcctgctcctcctcttttcccatactaattttatgaatttgcaagacgctctaaacttaacagacatcttttgagcacattctctacatcctagagccttaagctagtttggggaccaaagctggttgtaaatggataaaaattctaggaagtctctaagcttccctgttgggggaaggaccggcactagtgccactgggctcctgtcaggccatctcactcagcggtccctctgcctgccatttctctgtggggaggggggggcaaattcctctcaataccgtgcaatgcaccactcacctcatggtcagccatcacatcacccaattacccggtagaattaaaactcttaagcttatagttaaccagttagatttatgtatcaataatatcacaacttacaagttgcctatacaataatttcagagccaattgataatgataaatgctttatcccaattaatctaaccttacaaaaccacaactacttgtggctggtaaatgccacacaggttcatgtgcgcaggcatcttccttctctctcccctctctcccctgagacgctctctgtctcttcaactcttagctctgcctcccttttccctgtccaacacaggcctcctctacgctaatgtaattggacagggaaaattctgcaacacttcccaacactttatttttgttgtgtgctaaaattcataccaagtgaacttacagaagagttttttgttttttgtttttttgtttttgttttttttggtactcttccaaaggggaagtccacaatagtgtaaaaggcatggcaactgtagttgttagctggctggtcatagcttcaaacacaagcagaaagaaaagagagtgaactggaagtggggagaggccgtaggctctgaaagcacaccagaaccctaatttcttcaaacagcaccgcgagctggtgactttctccctcaaaccaccacgtcctccctgacatcctcctccaacctggcccctgtgtcagcactactggggcgaaggtgcaaacacacatgcgggtgggtggcttttataccagagaagaagtactggaagtctactgtataaacattatgagtaaacaggcaaacgattctgtactcattgggtaaagaagtatgctttatgtctgccgcttgccaccatcctgaggaaacacttatataagggaaaggaaaactgaaggctgggactgcatctcagtgatggagagcttacctagctgtcttagtcaggctttttattcctgcacaaacatcaggaccaagaagcaagttgggtaggaaagggtttatttggcttacacttccatgctgctgttcatcaccaaggaactcaggactggaactcaagcaggtcagggagcaggagctgatgcagaggccatggagggatgttccttactggcttgcttcccctggcttgctcagcttgctctcttataaaaccaagactaccagcccagggatggcaccacccacaaggggcctttcccccttgatctctaattgagaaaatgccttacagttgtatctcatggaggcatttcctcaactgaagctcctttctctgtgataactccagctgtgtcaagttgacacaaaactagccagtacacctagcgcttgtgcagggctctgggtttgatttctagtgttttctctctccctgccccacccccattccaccccccctccacacccacccccgccacagagccatgtaaaaaactccattttaagttatcacaccttccagtgttcttaatctttaaccttcttcagcttctgggcatgtcagttgaagatgcttagaaacctgtggtctctggctgcttaaaagatttctggagttatgtacatagcctacctcttgtaattttataattgttatattctaattgattaaatgtatagcagtttatacacataccagttctcacatacattatatttaaaatatatacaaaatatagttaaaatctacatttaagttttggtggagataaagaaatattagttgaaagacattaataatgatgacaagccaaggcgtgaattacactgtactgagagctttgcggttggattgctatgtgccacccctccccacatgttcatcttcacaagagcaggtctctgatgtgttccttgctgtctgtagttcattttgatagcacagtattgattacatctggtgactatatatagcttctcctatgtatagaattccagaagagtagtagttgtatttgctccactcatcacactatttagcccatagtaggtatacaaatatagcaactgtcattatgtgtactaactctagtgagcatttttagaaatctgggtggttgggccagcaaggtggcccagcagataaaggtgcttgatgcaaagcctggctaccttgatctcagtcttggaccccccatggcaggaaagagcgaactcttaaaggctgtccccaggtcttcatatgtgctgtggtacttgtgtgttcctcttccccaacaaataataaacagctgtaaaagagtaaaaagaagtacagctggttagacgtaggtcacacatatgggcaagtagttttattttttatgaagagatgctgtgtatctagggagaaaggaagcttgaccagatatagaaagctgattctgagaacaggtcatgacagctgggagactcacaaagcccctccctaaagttgtataagcagaaaacagttggtggaagaagagacagaggtgcctataggttggccaggacactgtagacacagtccctcctgagttctcacccacactgggtagaactgttaggggtgacttaccttggagtcttctgtgagtgaccccagtgaactcattcagtcatcaagcaagacttggctcgagtggtttctttgttttgtcctcagtttcttacctgggatgacatttgttcacgtgatcccaggaaaagccatgagcatgaagataatacattgcatggagagcaaatataaaagatgaaaaaacagaattgttaagtcccgtccatatgacaggaaacagcgaatattctaagttacaaagtgttggcggtaactatctctgggttatggggttgtatatggttttaatctttttctagttattatttataatgtggaaacaccagcttattttacttgatagtaacttttttctttactgagtcagtgtcttatatagcctagattgtcctggaattcatcatgtagctgagactggaaaatcctgattcttctgcccccacctccccagttagggattacaggcatgtgataccacatccagatactacttttattatcagaaacaataatgggtcctataagaagacactttcagctctgttgtgagctgagcccttgctagatggcactaagttttagcttcagaatcttgcttagttaggctctctggagtagagttctttaaagatgatgtttttggttttggattagccaaatccacttcaagaactgggcttgataaggtgtatctatattagcctagaatttgggaagaggaggcagaaggatcctgagttcaggatagcctgggctacagagctagagtccatgtcaacaatcaaaactcaaagatagtgctcgcttcggcagcacatatactaaaattggaacgatacagaaaagattagcatggcccctgcacaaggatgacacacaaatttgtgaagtgttccatatttttaagaagcgggagtgggtgggtaggggagcagggcggggggagggtataggggatttttgggatagcatttgaagtgtaaatgaagaaaatagctaataagaaattgaaaaaaaaaaaaaccctcaaagataaagcaacagcaaccaaaaaaccacaactctaaacccaagcacacttgaaataatatttattagatgccaatctgaaattgacctttccagcaaccttgatctaactgccatgtgattggtgttggccactgaaatatcagacaagactgaaaactatagagaagctgatttttccttattctgtgcccctcaattgtcttttaagaaagtccatgggtagaaaatgtaaatcatgtctgggaataacaacctgttctcacatttttcttaaagtaattcatgctacttcttgatagatggagaaatgcctaggttaggtgagaaatccctgaagatcctacggtttttttttaataagcccagtccatctgtacctgccttgccagctcttctaggataattaaacagtgatggattaggactaggctgtggcagggattgggaaaaaaaaaatctcccagcatcccttcctgcggaagcagccgccacagtagtgagtgtagctgccactgtcactgacaggtcttaaattcacccctgcagtgcgccgggagcctggctgatgccggtaacttctctgccaggtctggccattgaaagtctctcgagactggggaacgaaacagacgttgaaggtttctgttggttttacattaaggaaggactcctctttttagttggttttaaaaagagctggtaggagagagagccatcctcacagtggaacccggttctttcctctgaagttacagctgccgtaaacccgtgagtatgctgtatttatttagtagttccagggggacatgattgcaaggtcctctctaagtctgtgaggatttatttaaggaaagctttggggaaataaattaaagagttctgtttcattagagaccttcaggttttgttagatgacattgtcctcttagcagcttcctgccaggcttgccgggtcttcccacgccccctccctttttgactcttcccgagggcgagagctgtaattgcagaaagccgcatgcacgcctgtgtctgtgcgcctgcctgagccgcagaggctgtggtctctcccggtgccctggcgggctgaccatggctggctgacggctgctgcaaggtgtgccctggggctcccgagactcccactgcagaacaatggcagcaggaggaggctcacttgtgtttgtcttaggtcctctgctgccttcttcttagcattttatcttgctatgttaattaaggctttaaagatgaataaagtgatgttcattcagaaatagcttgtgccctttatcctagaccttcagctcctcctgggtgatattggcttcagctagtcttctcagcagatcagagcgactgtgagcccccagaaagtgagctctgcctcacggcatttttaagttgtgcactggaatcactgctgactcgtgtgtccgtgtgacgcagatcctgaactcagaacatctgtcctgagtcatcgtgccccactttccccctctggaattcaccagagtgcagctgtttgctggattggtgaacgcaccctgagaagcctgttaggacagaggttgacttgggattcctcttgtgacctcacatgttcttgattgggctttgtgaactgattaatatcagttggccattgatatcctttctgtatcctaaaaccacactaaagtggtttttagaagagaggttggcagtcaaaatacttttaaacaccaactggtagcagtcatctttgtacatgtagtatgcctgacttaggctgacataatataggagctttcagaatgccagtatttggttgatttcctgcagactaaaaataaatacaggattattaaaaaaaaaaagaaaaagaaaaaaatccctgccacctagagatcaaacatctgctgtttttatttttaaacagtttgtcatacctaaatgcagcaacttgaatttaattaggaagggttgctaaatttaggacactctgtctttaaactagcaaagagcattcattcattcattcattcattcattcacaaatgttaacatttgttgcaaagctttttttcaagctctggggagatgaggctgaagaaaacattgtatttggattcctggaatagacgttttaagtagataaaggaggtggttaaaaactatttaccaagttatttcattagagctgtggtgagcttttcagctatgtaaaactacaggctacctttatgagcagctttatatggaacacataaatgcttgaaacttgtgctgcctcagatcttttgtcatggagtctttgagttcttagctggagaggtatgttagaaatatttccattagttcaatgagcatgcactaggcatggtaagagcagagtttagatgagaaagaactggtttctgctttgcctggtccactggggaagggagggagactggttatcatgtacattctgtgccaccgttttcctgtcttaggggagtcatagaactagactcttcttcaaaagacttctgggccaggccactacttctcctctcttttcctctaccactctctttccttctcttcttcttctttttatttttttgttttttgagacagggtttctctgtatagtcctggctgtcctggaactcactctgtagaccaggctggcctcaaacttagaaatctgcctgcctctgcctcccaagctctgggtttaaagggatgcgccaccacgcccggctctttccttctctttttactttactgtcctgtcctgtcacaaaagagaaaattgactcaggttaaagcacagggccatttcagattgctgattgtaatgaccaagtcatgcccattgcctggggtcatcagagtgctgattgtaatggcacaaactccttgagtgattgcattgtgtcttccagctggaggttgattggggcgagtctcccccagttaaccctcctctggtataagtttcagtgtgctgctgggtatcataaatcataaaaaggaagaagtgattatttcctttggcgccaagcccagatcttctatcatttgcactcgctttcctcttgctcgcttccatcttcacctccttttagagaggcaaaggctgtgtatagacagactgagcttcagtggtgggccagggaaagacctgcaagaggttcatccgagaaaagaaacggccttgggaagaagctaacatttcttgcacttcctgttcagattgctgtcaagtccagatagctgtcaaccttagcagagctcccagggtcccacagcagtgtgtcagctcctgcatgcagtaatgaggcagagtgacttcagtagacacattctagcaggtttcccttgacctgccacagtttctagatggcgccactgcttcttggtgggaactgtgacaaagaactgggaacccatgggatctgttaacaccacactccctgagtaagtcccctttgtgcttccagctttgtcaccttaaacccagcagctttggctgacctggggctgttcacccagctgctggacagttcttagtttatgcgttaacagtttgcgagcagagttagctctcttaaagctgtttgagccttgattgctgtgcccatcctaggaattgcccaccctctggctgtacccatgtgtttgctgcctctgcactgaaggcatgagcacgttggccaggccactgtgggtgttggagacccctctctaggctaacactctgacatcaacctaactgccatgtggcctttgtgagaggtggcaagtgctgctctaaggcagacttcgtgcctagcatgtggatttgtgcacatttcacacatggattcctcttcttttgatatttcatcagtccacaggtgtggacagtccttagagaccattcaagtggcactgatgggtttctttagtgattatgtagattagtgtactatagaatgttatttgaaatcatacaggtggccgcacttcagaagaagaagaacatggggctaagacttgaatttcacctgtggttggggctgtggtcattatctttttagacagagagtacggcagaacttgagcctctcaattatccacaaaccaggacctaacacaaaacatttacctgctgttcacctccaaaatagcttagggtttctcttttctcttcttttcttttcttttcttttcttttcttttcttttcttttctttccctttccctttccctttccctttccctttccctttccctttccctttccctttccctttccctttccctttccctttccctttcccttcccttcccttccttcatccctccctcctcccccctctttttgcccctctttctttgcagtagcaccagttgtggaagccattgcatctggtggctttgtatcacaagctgaaataaatatagcctatcatcagctaggagagcataaatgctggtgcttgatttcttaagcatttatgaagccctccttccacgcagacacagccacagcatccctgcactaatacagtcccgtgctcacttcataaactgctcaccacaactcaaataaccagtcagagagcagagacgcagacagtctgagaaaatggcttttttgtggccgttgttttcgctccctctcttggactaggaggtggatgaaagaaaaccttgtcttcgcaattgtttaaagatatctagctattcttcgtttcagttgggggcttcttttctttttttttttctaaagtgctcagtttctttccagttatcgtcacaccgaaaacctgcatttgctctgcaccctgcaaatatttgcttccgtgctgggaggcgtattgtaattggccaaacactgcttttagctgtcccaggactactggaaacattagacagaactgctgagtagcaggaatgccctggtctgtgtaatgggaagctcttggttctcctcatcttaagtggcccagtagcatcaccaccgattacagccccttgcgcttatttatgtggtgtctcagtttaaaaggtggttttacaaatggagcggctccattagactgagctgggaattgttctttcctgctcttgctgaggcctaccatcaaaactgatgacacacctaggggagcaatccagttttgccctgtttctctctacgccacctcctctgtccctggggtactctggtgagaaagagatgaagtaaatttattgctgggagggaggaggattttcttcctgtttgcctttcagttaagagatgagcagtggggcctgggaagacggagtaggagctgcgcacatctccggcagacctgccgccctcttgtagtttatttggaataacacaggaaatttgatttgctctgcctaaggacagaagttgcaaacgtctagatttctgctcttgggagcttgcagcgtcttcaggcaaggaaaacagcactccttggggaatagtgtcctttcaggtctgagctggtttataagctaggtgaagatgaactcttattctccccaaatggtttggctttgctgtaaagcccccattcccaccaggaacagagaacaaaccgacgtggagctggcgttgctaagttgactttcctattgccagtaccctcttttggaagggtgctggctttgggagtggtgagggagagtcattggcaagtgacctgaaactctgcagcggcggctgtgtctagctccttctctccttccagggagaagctgcaagtgattgggaggagccctgcctggctgggagttgccatcctgccttcccaccagcttctagcctgcctggggggggggggggatgattgtggagggtagttgttggtacctgtggggcgtgtgagtggacccggccttgatcctggggagttatagttctctcttgatattggttggcccacaagaaccccggatgctaaagctatttccactttgtcactaagctagcctgaaaatagcctcatttttgtagtaattccagacagagagggaacgtgcagtagccaaatgaagagccaatgaatatgcttaatctagtttcagtatgtactttttattttctctataagctgggtatggtggcacacatctgtcgtcatctcagcctttgggaggttgaggcaggaggattgcaagcttaaagctggtttgggctatatgaaactctgtctcaaaaaaaggtggtggtggtggtggtgttatatactccttgtgagtcattcgagagtgggtgctgcagacgggcggtgggagtcttcccagtgaacaaggctgtttctgtgcttccgtgtcctcagctttctgcctgtgcttccatctcgctctgaagttaactttatgtccttgagaaccagccttgagtgcctgccctggctggctgatggctgtcgattgactttcccacagttggctttaacagtgagtgtgtcgaggttggggggtagaccagggtggctggtctgctgaggggagggtgggcaacccttcagttgtcccctggttcctttacccagtcggcgtaatgctaaatgaaggttcccccttgcaaagcccagggataactgctgagacactggctttcttcaagatgtttgctgtccctggaagagcttgttatttaggagttggctcactttgttcctcctggatgctccatccgactcgatgaatacaacttaagtggtgtcagttagcattctgccacgttcatcagcacttcactaccatgttgctaagccacatctctcctaaaatttagtttattactgtcatgcatgtgtgtgagatgtgtgtgagtgcaggtgcaaacgtgccacagtgtgtgtgtgtgtgtgtgtgtgtgtgtgtgtgtgtggtcatgggcagagaacaacttttgggagtgggtactcactctccttccacctttatttaggctccagagatggctagtacaccactgtttattgtccctccagggctcgttccttctgtaaagagtaggtctcccgttgagctgggtccctgggaagatctgtgatccccactgcctgggaggctgaggctggaagaagacggagaactcaaggcctgcctgggcaatttagtgaaacctgtcttggaatagaagtgaaaaggaggtggaaacatagctcagtgggagagtgctcagcgcagcccagtccccagcacaagcaaacagggttagagcatagatcggtttcagcaaaggcagacaacaggaaaaaaccaggttgaaggtacatttataaatctgaaaacagttgagatgtttaaaaatgaactattttagtttaattcttaaaatagtaatggagcatgttataatggaggagataaaaaaaggccgaattagaaaaagaccacagaggtttaagaactttgccacattagtggaaaattgaaatttttctgaatgacctaaaatgatgtgggaaaaacattaggtagagaaactctggcttcctaggaagggctacaggaaggctacaggcaaggctacaggcaaggctacaggaaggctacaggccatacatagatggcctggcctgattttagctaggaagggctacaggcaaggctacaggccatacatagatggcctggcctgattttagctccatttgagctgtgtgcggtgtgcatggggtgttgagagtttctctccttaaactaatacttgaatgtctctctagtgcttggagtctaagtattccttcacttgattatgaaaacaatacatgactatgtctgaaaatttgcaacactggggacaggaacaaagaataggaaccctgcctgccacatcctagagatgacagtgatgagtttggttttggtttgtgaactttggtagtaagtctagagaagggtgtcttggaccactctactgctgtcatatctaatatttccttatttcaggataaaacaaggatctttttttttttatcaccccatggctctgtcagttttatttcctataaggagttggggtgagaaggaggggaagttgggatggtattcttctgaccctggtggctgtggtgataggcaggtgagtggtggtgggtgctgaagggaaagcgctgttgattgacattctgagttctggctgtttgtcttccctttactcccaccctcctccaccgagcatctttgtttcagacttaaaggaaaagatttatttttatttgtatatattctctgtgtctgtggtgtaagcgtagctgtagactgtactttatgcataaaaacttgatctattgcaattgtatctcccaaagaattgacccaaagacctattacatttattaacaagctgcaagtctaggctgggcagattctgagctattctaatcctctaaggctgttaatatcagacaaatgccctgttacttgccaatctggttttgccctgcctcgctctggtccatgtgtgccctcgtgtctgctctctcattgcaatctcatggcgaatcctccagggtctctccacggggtctcttcacctctcctcctggtccttttacttttttctccgtgggacccctggctgggattggaagtccagctttcctatttcctctgcccagctaattggccaatcaactcttgactgcccagtcagaaggtgatagagaaggatgtttacaaaacactgagacaggtgatgcctcacaaaaataactatcaaagactggtctgtactcaattctctgtctgtatataaatcagcatttgaataatgcaagggtaatctttacacagtacacaaaagcatcattccaacttgcacaggggctagcaaggaccagtagaggatgtcatattccctggagctggagttacggcagttgtgaaccgcctctggattctgagaatgtaacttgagttcctggaaaagcagcaagtgcctttaacagctgagttgtctctctagcccctctttttgattaaaaaacattttatttagttgtgtgctgtacgtatgtccatcacgcttgctatagcatgtgtcggggtctgaggataactgttggaagtcagttttctactttcactgggtagattctggggatccaattctggttatcaggcctgtggcaagtgtctttacctactgagtcctctgatattttttgagagtctcatgaggcccaggctaccattaattcaccatgtagcagtgactgtgctaactcccgatgtccctgtgtctgtcccccaagcaccagggttacagctgtgtgccaccacacctggcttgcctctttctttctcatcctccttgtgagaatctttctctctcattgatcactggccgtgagcttggctcctggaagaactcgtctattgggctgctacactttattggttagcgtttaaaattatatacccactttggaaaaaaattggtggcaattcttcagtgtcaaatgtggaattatcatatgacctagtctatcatagtcacgtaaaacttacatgtgagcattaataacagcaatctccatgatgtacaaaaagcaaaatgtcccatgtgttatgaacaaatgaaatgataaccaaattgggcatatctctccagtggcatattccatagtattacatatggtagagtgttgctccctgttccatacagcatgaatgaatcttggaaacatgggaagtggaaaaagccaaccattgaaaacatctacagatgcaaaagactctggtttgcttagaactagaggtcacgagggttatggagcatggtggcaagtggggggtacctttgtgtgatgggatgttgttatattggggtgatagttggatggatgcctttgggaattatatatcaaaatctatttaaagcattttttaaaaactaaagtgttcaaaacaatgcaatataaagacatattttccttatatacgaatacctgtagttgtcactgtcaatcaaatgagtggttttttttttctctccaatatttgaaaacattctttactacttgagtatagtggtgtttcagatttaaaaaaagaagcactcaggtaaatattaaaacttgtgctacttgtggtggcacaaattttaaagttatggagcaacataaagtttagtgttgttcttttaaatacatggatatcagcacagtgtttatatactgctaacctatattgaaggaaataagcaaagccttgaataagtcatgagcttaggtagccaattcatatagagaaagcggggcagcagacagacatgtatcgtggtggtagctcgtgttaggaggaagggcacaccagacttgttccttttgtaacattgttcatggaagctcaaaggttgtagttgaactacctgactacctggctacctgatcagattctcccacaggatctacctcccaagggtccactgtctcctacttggagcaggtcttttaatcacagtggacttgggagagggcagagcagacgggaacatagatgtaaaaatgcaatagtacaaagaacatttttcagatttcggtaataatataatgaaatctgaataaaaaaagtccagcaagaccttttgtgtaactttataattatggctgttacaatcacataaatgggaatgacagtataatacaaagatccccaaatgccagttgaggaagcagaggactcacttctgcttgtctccgcttagcagaaagctgaggtgatgtcaagtgtgtaacctgcagagagaatggatgtgtgcaacggaagtgtgtccaggaccaggtggaatgcatgggaacttgctctcagttaggggttgcagcatggtgcagcattgtccacaaataactgcagcatccatgtgtggatgatcatccaggtgataaagggcctcccaaagcacttgggaaactgaagacaaaatgtcgagataagatttattaaacacaaaccgttttatttgttttatcaccagcccagggattaaaccatagcacgttcggacattcgtatatctattggagtaaaatagctgcaaactagtgtcaaggttttaaaaagatgtacttatttatgcatatgaatgctttgcctgcgtgtacatgtaggcactgtgtgtgtgccctttgtgagcctggtgttcacaggggtcaaaagagggcattgggtcctctgggaactggagctgtgggtggctgtgagctcgaacctggatcttctctaagagcaacaggctaactgctgagtcatctcttccagcaccaatgtcacattttctagaatataatcttaatagaaagtgaccagtcaagcaaaggcaagcagatctctggaggatgagttcctgtgtgcctgccagtgtttaaggatcttgagaggacttcagtcttccttttatctggtttctgagctaacaaatggctgaaggatgagctattgattgcctatctttggaggaacggaggaattgggggcgagaattgaatgtagctcacactgtacccaaaaccacattctagatataatgtatgtgagctgtgctatattttctccactgtacatttgaaacatttctagcattgggggaagaaaagggaggaaataggttcttgatgctttttgatgaagaatgccatgccatgcctagaacgatgagtgggaggcaggattctgcactgtcagcacccacagcccagtttctttcctgattctccgaggccctcctgttacgtcattgacatccttctgagaaggcagtatatgctgactactctgcccagtaacctttctacagagcattagaagaaaccacagaggggaagttggaagagagccgataaggggctgtgttgggcaccggatgtggggaaacaaaggggacgggggaaattcacgtcccgcccgagctcggggagaatggacaggcagacgagggagactcatgggaccctacggaattgctgcaggatgggcgtcgggccgtagaccccgttctgggtgggtagagtggggttgggggaaggcgcagtcttggctacggctctcgggcaccatagaccaagagccagcttcagggtccctgggccaaatggaggccacagacaacaggttttcagtcttggacatcccaggtgcggctggatgtcgctgaagggctgagaacgaagtgggggcccctggggcagctaggtcagccccagggctgaagggagaaggggcaggggaaaggtgctgggtggtttctgggtgggcgagagtctggctagctcaggctgctcgctctgtgggcatggctagagcacaggaaggcctgctccattgctccagcccggtggatcctgatgagaagaggcagtccatggtttcaaggtgtttattgcagagagagggagaagtgtagagaaatagaagctggccatggccacaaggagagaggggagaagaggggggaagaaggagggtgaaaggtgagagtaagagcaagtgcttaagagagacaagagagagaggaggggccaagcagccccttttatagtgggctgggctaccttgctgttgcagggtaactgtggggaggagcatacttggctatatagactacatgactgatagccacagaattaaggagctgggtcctcgtgtcaggagcctatgtctgggagcatggcaaacaggccttctgtcccttccagattaatctgctgggtttgaacctagctcgaccagaaagcaggctgcctttcacggtcccacagagctgtaggtagaactatgcctgctggccttaagaatgaattttggctcttgtcaaaaaggtgatgtggcccttggtggcatgctatgaccagatccctgaagtagccatgcagaaggggagatggtcagacacgcatacctttctattgatgtttgtatttgaaatgtgttacagaactcacatcctaaactagagaaacaactgatcctgagcaaatactgctgaaaaagtgcaggttgtagtatcataggcctgttgtgatgttaatgtaaaatttaaaacatagactttctgggacttttagtgtgtataaaagcataaagggtgagaaggatgtaatttaagtatttgtaaccagacccaggtctggctgctcacctacacttaggaaataagaggccggtgggaaggaatttgttttattgaagaactggtattcagggcctggcatgggagcatacacctgcaatgctggcactcagaaggctgagggcaagcaaggtttgttttcagtgtcagtctggctatagacaaaacttttctcttacaaaaaaccaaacaaaccagcaaacaaacagtgggactggagaggtagtttactggttaagagcactggttaccctttcagagggacctgagttggattctcaacacccacacagcagctcataaccatctgaaactccagactcagaaaactcagatattcactctggctttctggatcaccaggctctcacacgtgatacccatgcagccagaacagccatgcacgttaaaactgcaacaaacccagcagcctaagagggtgggtagctgttgcctcagggctccatcttataaatgtaataattatttcaataacgttctaataaaatatgtatagctttacttggggaaaaaagttctgagccatgcttggtggctcatatctgtaatctcagcccttgggaagtcgaagccagaagattgttgtgagtagagacagaccctaacaaaaaacaaaacaaaacaaaacaaaacgctggaagactatacatatagtaatctgggctaagcagtgacgcactcacggtcccagcatttggtacatagagtcaggaggacgtggcaatttgagaccaccctgattcacataggagttccaggccagccaggactatgttgccagactctgcctgttcctgccctcttcctcaaggggggtggggggaggaaaaaattaaagaaaagggatacaaaagatgaaggctgtgggttagtagttttaacctataggtcatgtttcctttgagtggattgcatatcagatatcctgcatttcagatatttacattatgattcatatcagtagcaaaattacagatacgaagtagcaactaaataattttatggtttggggggccgtcaccacaatatgaggaactgtattacagagtcacagcatttggagggttgagaaatattgctgtgggtgattttaatatttatgtatgttaaaacataaggaaagttggtaagtctcccagtggttttatttcagaaatgtttaacacaaaatagaattgcgttacttgctttccaaactgaagtagaggtgagccatacgaaatgattgacgcatgtgtgttgtactctcatgtttgtgcagccctttctcacagatcaaagaactaaaacccctcactggtttcaatccacagatctccatcggacatggccaccagcggctttcactttgtaccatgcgagaccaaacggacctccagacagcttggagcatctgctatgggaagacctgaagggtatgtggggactgttgggtactctcaagagactagaacaccagtgaggtgggggtgggcctaggcagttatggagtcctttggcaagttagagaagaagatgcacgccagggggcttggtggtatagtaacagcaatactaaattcaattctggggcacaggttcttgattctggacaaacctgagtgttattttgtgtgtgtgcatgtgtgtgaggacgagcaccacggcacatgtgtgtgtgtgtgtgtgtgtgtgtgtgtgtgtgtgtgtgcgcgtgcgtgcgtgcgtgtagggcacaggacaacatgcggagtcagttctctcattcctctctgtgggtttcaggaattgaactctgatcatcctcgttcgggcttggcagcaggaacctcttactggcctatctttaaaggttaaaactttggtcttatttgttttgtttgttattgtagctgggcaggcctggagtgagctacacagatgaagatggccttgaattcccaacccttctacacaaagttctggaattacaactaccacatgtgacctataatagattttaaaaactaacattgtgttcctatttttcttccttatattttctcatgtctttggcttgaaaatactttttttttttttttttggtttttcaagacagggtttctctgtatagccctggctgtcctggaactcactctgtagaccaggctggcctcgaactcagaaatctgcctgcctctgcctcccgagtgctgggattttgaaaatacattttaagaaacatatccactgtggaaactcagtagcttcagaaaagcttatgtccttcttagacttactgagttgttttaattaggatcatgttacattgttctgtagtctgcttttaaaagttacagatcattatattttccatccctaataggcatggattaaaattataatactatttaattgccagttattgtcttttcagtttattccagaattaacagatttctgattgtctaagttgatttttttaatgttttttcaaaaagtatgtgtaatatgtaatgcatgtgctcacatacgtgtgtatgtatctgcatgtttgtgtatgctgtgtgcatgaatgtgggtgctcgtgtgcatgtgtgtggcggtcagaggacacacggacacacacaggtcagttcttaccactcactctgtgtgaagaagcaggatgtcttttgctagctgtttactccaggctagccggctactggcttctgtctccacttcctctatctctatagcaatgctgggattatgagtcacagcatctggttttacgtgggttctgggcacatgaacttctgcccagtgctttatccatccagcctttcctgagccttcggttgatcttgtatgagttacaggcctttttgttaaagttctcttaaaacccatgggaaacactgtgcattcttactcatgggcttgtagagctttgaagtttatatatcaggtcttcatgtgagagttcacaattggaattagctatttacaagtgggtccaatttactcatgagtttggcaaattgtcataatatggaaggggttgagggatggagatgaaggtggaaataacttgtaagagtcttaaaattttattttccacattgctttttaaaattccaaatgtccttgctcatggaatttttgtttttttgtctagaaaaaatattcacttcttagagttatcctttaatttttatgtttcctaggtcactaatgcatcaatatttataaagctgtttaaaagccgtagtaaaataaacacaactgaaagtactaatgagtaaggtcacagctcgactaaagctaaggcctgggactcttagctggaaggcctggatcacggatgctgtttctgggagacagcaggctataagaagggagaggctgcagggggaggggatgggcagagggaccttgggaaggggggaaggctagctgagagagtgagggttctagcgagagccacagacataggggctgagagtgaaacagcagaggacacaagctagacaaggatttcagggtgggcgagctctgaatgtggtccacaaggcagatgttgtaaagcgacgtgcatggtgccctctgcaaggtattctttgtatttcgtggtcagctcttgatgagaatggaggacattggggcaggacttgggctttggtgacagatgccactgtttagttctttggtaggtgtgctaagcataatcagcttttgttaccatagaaactacctgaagcaatcaacttagaaaggtttctgttgtctcacaaaccataaattcagtgtttctggcctgtgatgggccagccccactgcttttggctctgtcatagggggcatgttgtggagggaatttggagtgcatggcggggcaatactgcactacatcatggtcagggaaggagacaggaggaggaagccagagcaccacagttccctttaagggtgtctgtccatcgcctaaagatctgccacttgggccccacctcttagtttaccgttcccagataatacacctttggagacgaacgcttttaatacatcggtctttgggggcatttcagatgcaaactagcaaagatgccatggtaggatacacagagaggctgagggtaagttatttccttctttagtttgcttaggttaaaataagtgagatttgtgcatctgagtcaggaagaggaaaggttagagatgtacatccaggaagatgtggaggcagagtgtgggcaatgctgtagagatgcttttattacggtagtaacgcttgtagtttttgcagccatagcaatgtgcccagcctgtttcatcagaagatattcattctgctgatgtccgtgaagcaacagcctttttggagtctgtgagtgtggttggcattagttaggtggtccaggaaatgaccagtgtacacctggttgctcttccttggtctgcccctcccctcaaacacctgcctgcggctccaaacggggcaggcagttgggagtttgggtcaccatttaagaaactggaagcagtagatgctatgtgaattgataggtgctgcaaccaggcaaacgacgttctgccgtcatctccgggcagcataccttttgtgattccgtctgcccttgtcggacctcttgtttgtttagtctcaaatccttgtgatggtttcttttgattatcattcaacctggaaataagaggagagaaatcttcccatagaagaaatttgatacgtagagaagaacatgactattagctatgatactttgtggctctggaattgtttgattttgtatttattatcatatactgtatctttaaaaaccagtgtttttaaagggcacgagtgacaaagtcacagatttcagcaagtggtgtgctatcacatccagtttcttgatagactagttgctgaagtagttgtgttaagcactttggaaaaatgagggaagactgtgttggccggcactctcaccgtcggatcagcctcttaccatgtcccgtaattagagaggagacatgctgttaggtcttcacgcaggcattttttatggaagtgggctgttgcaaaggttgctcattttcaaatcccagggataaagtatatcattgtcctcaaggacaaagtgtatcattatccctttgatgtgtattgtatttaaggaaatgtatcctccttcatgaaagcaggagtctgagctctcaggttaaagaaatagagagaaactttctaaaaacttctttattcttgttgtatggattctacttcatccccatgtgggtacaaagcaggctagtgtcagttattaatgaaggctgctttgggggaatcccagcaccatgaaggagattatagccactaaggaggtaaaattccagagacagtttagtaggatgagactcccaaatggctaaatcattgattgtggcaaattttgagtggaggctagtgacaagaacataggttcaggccaggcagtggtggcgagtgcccttaatcccagcacttgggaggcagaggcaggtggatttctgagttcgaggccagcctggtctacagagtgagttgttcaaggacagccagggctacacagagaaaccctgtctcgaaaagcaaaaacaaaaacaaacaagcaaaattaagaacataggttcagttttgtagggtataaaagttctggagattgcacagtaatgtggctatactgggtatcctggactgtgctttttaagtggatataatattttattataattttattttattatgcatgatcttgttatttttaaaaaagaatgaaggatagactgatcaaaccattgaccctaacctagcttcccttttcctctttaattaattaatggatagcatgcttgtggggggaggggttgcaatgctatgttcacaggacagccacagctgtctgtcccctggaaccttctaccgttgtttgaggaaggatctcttactgggctggagcttcccacataggccaggctagttggcctgtgagtgttcagggacccacctctttccatcttccgcatcgttgctagggttaccggtgtgcttcaccgcatcctgcttttacgtggtttctggggctccagactcaggtcctggggtttacaaggcacatgctttactgactgacctatctctgcagcctttgtcatttggataagaggtctcaccatgttgtctatgctggccttgaattccctatctagctcggctggtcttgaactttgagcagtgctcctcctcagctttctagtttctgtgattacaagtgtgtgccgccacacctggcttctttgtcttagagggtgatgtaggcagtgtttaccctttgtatcagagagtaagcatccaccagtacacttccccatatcctcgggaaagacccttcctagtgtaagagggaacgcagcctgagctccggaagtgaaggcgggcctctggtgtgcacctcctcttcctgcttatttccctcctccctgcctttcctgcttcttccgaactcatttggcatttgcccacggcactgaattccctgcttatccagatctctcatcttcaccactaggctaaatcaaggtagttcccagtatttgccaagaagctgtttaaaaatcagttaattcttttagaggcaaattaggcattgcaaaaatagcatcacactaatgagctattaaagagcagctcactgcactcatacttaaataaactaggatgggcagaaatggccaaagcagagctaatgtacaggaacttagactagactaagttgcttgttgctgctgcttctgcttctccttctcctcctcctcctcttattcctcctcctcttcttcctctccctcctcctcctcttcctcctcctgctctttctatgtagccccagctgtcctggatctcaatatgagaccaggttggctggaaactcacatgcattcttgcctttgtttcccaagtgctcggactacatgccgtgtaccaaccacgccttttagttcgggaagatgttaatttttacctctttcctttcagtgtataattcaatcacatttttatccttttttgcattcgaatttttgtcttctctggcttttgcagcagcagctgatacctactaagcaaatattactagattttgactaatttatgtgtgagagattattaaaacagggcctttctctgcagatcacattgaggggtggtgcaaaacctcagagagaagcctggggcacaccgacattttgttttgttttgttttgttttgttttgttttgttttgttttgttttgttttgttttgtttaagacagtgtagccctggctggcctggagcttgctttgtagaccaggctggtttcaaactcagagagatctgcttgcctctgcctttcgagagctgggactaaaggtgtgctccccacatctgctgggggacaggatttctgagacagtgcacttggctttgttcttaggatagaatccaccccctctgacactatagtctctgactttggcctagtttctgtcatttctctcattttctgtcttgcttgcagcatatgcagcctagaagtcctcctccctgcaacctagatattcccatgagtcaccccactgtataatagttagggagcatctttcagtcacagtcatcctcagaattaggcctccgtgcctgtgacctttgccctcccaacccctcatgtagttggtgcctactatgggcacttgtttgttggtcaaactttctcaaaactgccccaggaaatagattgctgtgctcccattttacagataaggaagttgaggcccagctatgttatagacagagttggtgttgttagaaaatgatgccctagaatgtaagagtggtagtatgtacttaggaagccaaggcaggtagattacatcagttctcggctggtctgggttacttagtgagctttaggccaggactccagttaaaaagaatgaaaagaaggaaggtaaaaggaaatgggagaaggcctaagagacatgggttctaagctccgttagtggtcagcgtggcaaggcaccatattttgggatgtcattttcttttcctgtttccttttggaagaacaaggaggaaccttctttgaagggcccctgtctgataagagagattattccagagagaatgcagtgctgtgtgccccctcccctccttcccacttaggaagaagagccagaggaaaaaagactcgagtggacaccaactgccttggccggccagaaggatttttcagggaaatgaagttcagagttttatggctatgatgaaagcactcagaggctagggcaggagaattgggccttgaggtccagaccagcctgggctgtggtgtgagaccctgtttcaaagagcaaactccagaaaaacaaaatcattggttgtctctggctctacttccctctctcctgcatagacttatctgcatctcagtgttaatgagggtaattgggcacccagagttcagccttgccatgtctgtgtgtgcagtgcacacttgtgcctcttttctatccacctgtttcttataggctcagagcattggccttacagaggatgggggaagcttctttgccccagcattgagaagcaccaaaggagggggaggggggatgtcagctggtctccagccctacttttactattagctcccggggcaaggagctaatagtaaaagttaccaaactcccatgtcttttcctttttctcttcagttcatcagccaaggtggatctcaagagcggcctggaggagtgtgcagaggcactgaacttatttctaagtaacaaatttaaagatgccctagagttgctacgtccatggtaattaactctatttctcagttgatattttatgtgtttttctgatgtcgtgtttgtatgttcccgtgtctgtgcctgcctcagtgtgtataagctagtttgaatgggacccatccggtcaatcagctttaaagaagtgttgtttcatattgggtcaggagaaattttccgatgcttacaccctagcctctacgcgtgctggggcgtcgtctccatggttttggagaatctctgaccagcgttgcctttgaagccagcaggggaataactagagatgcgtaatcccagtgctaagatcaaatctcagagaataggaatatgatgaaggctcgctactgttgtcatggaagttactaacgctgcgctttcaggcttggcagcacccccccccccacacacacacacaccctacctgctcactggccccagctgtgtatgtgatgtggactttgcagaagtgatcttgtagtggtctccagactcagcgtctagggggacgggggaagcttctttgatgctgaactggggggacctgatccctcatgtcaagtggccagcagtgtccctaagacttgcctgtcgtctactggacccctgcttccttcatcatcttcggtctgcctggctttgctgctctttagctctcgattctgactcagtgtctctgtgtcctttatttatttattttttttaaacaaaccctctttcacttatacaatgtgcttataaaatagcataaaaataaattattgatttcatggtctctgatctttatgcacagttcattgttaaaattccttttccaccccacttgagtgtgaggtttgaactgccactgataactggggtgataactggggtgggcgggcagtgccttcattcaggacaaaggctctttatttagactctgtgtgaggaagaacaaaaggaataaggttgcctcaggatgttgaaacatagatggtcaggtaagaggctttgagaggagctagcacgctcaggcagtgaccagagcctggttaccccactgttaggagctttcctcaggaccctcagatattagatcctaagggctactctctcaggtctctctgtgcgtgacctaatttagtgcaaaaatcttgcttcctcttggctttgactggaaaggagagaacagttttaaaggcactttttcttcatatcacattaaagtttcgcctcgcctcgactcgccttgccttgcctcatccccctcccttagattttttctccctccatcctccttttttagataaggttcaagtagcccaggctggcctcagactcacagaagaggaccttgagttcctgagctcctctttctgcttctctggatgctaagatcagctgtgtgtcaccaagcctcacccttttcagattttaaggtggtgcactgcccccattcaactggggaaaaaaaaatagctttgcttataaactttttccgaggaaaaaaagtccagaggctgcccccttgtgttgaatcagggaaaggcatgttgtccccagcacttcattctactgtgtgggtttcaattgatacttgaggttttaaagcaggctttttggagcttgtatcatttcagtaactatggaggagaagttgagatatacacggtgaggattaggtattgttggtatcagaaaaaacctgggcttttgtgtctttcctttccattgtactgagatgtactcaccggctgtgttttttccagggccaaggagagcatgtaccacgccttgggctacagcaccattgtggtgttgcaggctgtcatgaccttcgagcagcaggacatccagaatggcatctctgccatgaaggacgctttacaaacctgccaaaagtatgactgagtaatttatatccgagctaagacaacccctgccttcccgccagagtgccaagtgaatgcaggtcgctgaagtaaggggttggtttgaggttagccagagctatggagcaggacttgagatttaaagtgtcttggacagttccgttctatgcagtggaattataatacagctcccacttagcacctgtgccctctgctgggtacatggggcctgagctatggtacaagtctgagggaggcttcagaagggctagcagagagcatctttctagttcttttgcggtaggttggttaagaactgggtgccatgtcaagtcaaacagggagtgcacctgttctatgtgggagaaattgcacactcagaagggaacttttatttgcccgaggatgcctttggacacttgatttgttggaatgagagtgtcagttctcagctgtactctgcatgtagaaggccatcgtgaaggctcttacttatattggtgaattttaatgtggctaagatgaatcgtcatgtgactttgttataatctcaaatggagaacattttcctgactgcactttcagtccactcttttctgaggtaagtggaggcacttacctcaggcattctgctttcatccacaaaggaggggaggttcgtatgcagtgggcctgtgggctcctctacaccacccttagtaggctgagtgctcatggttggtggttcaggactaggcactgtatgcagaggagggaggcctggccttgcagagggactaggaattgccatgtggcgacatcttgctgtgattgaaaggatcaccagtgacagtgagcttcgcctgatgctgatctttgcccttgtcttcaatgcagatacaggaagaaatgcacagttgtcgagtctttctcaagtctcctttctcgagggtccctggaacaactgagtgaaggtaagcatccactgaggcttggtctctctgtcttctagaggctaagagcccctgaaccatcactgaagtgtagagaatgaaggaagtggcctttccttttcccagctcaccctggtccctggttgactttgaagctgtgtacacatttgtgcaaacagaaatgcatataagggacgcgcgcagtttgtttttcacttgctcttttttttttttcaaacattgaaccacacacttgtgctacaatgtgatcttgccccacaccagtgtccgtaaatgcgttttctctgtttggagctgtgcagttgtgaaatgggatggtactcggtacagcaacgtgattgttctttcatcactgaaggacagctctatggttttaatttttggacagctctatggttttaatttttttcctgttaacaaatattgttgtcctaaaatccttgtgtgtgtgtgtgtgtgtgtatatatatatatatatatatatatatatatatatatttgtgtattctttcaagtacttcatgagacagttttctaaaagtagaataactggaaccaagggtttataattttacaatattgataggtattggcattttcccccctcaaactatattcaactatcgttggagggtttcattttctacagactattaatgtttttccaaggtgaaagtactgttttgtttttcagacagggtcttcctatgggttccaccctggtctgaattcactctgtagaccaggctgaccttgaactcacagagatccacctgtctctgtctcccaagtgctgagattaaaggtgtatctggataaagtttataccttgaagtgacagtgctcgtctacatagctgatgaagatgtttggcttgtgggctttaagaataatcaggagtccaggaaagcactcagccagatagctgggaggaacatcatcacccattgttccctattccctctaagatgaggggagaagtagccctaatcagccctcaacagaagggtgcgtcatcaccagggggcatccagggactctagtgtcactttcaagcctgtgttttggaagagatgattagtgcaaaccctggagcagctgcggtttggggaagcgagcacagctctggggatggctgtcaaggcaggacagacctaatgtcaagtggacactgcacacacctggagagagatttaccatggggctccgtttgtcctgtaggagtgttgtcagcttgtttgggccattggagaagttagtgatgtgagctctcagtgttgatcacaggacaggactgtgacacgtcccttgtgtttaggacttactagaaaagagtattgactcaaccatggcagaaactgatggtattttgttggttactgtcagcagttgaaacctatcttctttttcatcagaaactgatctccgagcatccctaagaacaagagctggtactgggaggcctaaagtgtttccgagacaatccatgagactgaactggccccagtatgacttgcattgccttttccttcctgggaaccccatgtgactccttccctggtccattggtgactgcttccctttttctttgtggtgtgaaggtgacactggagagttttaaaccttagttttaagaggaatgacatggtatttttggtgtgagaataaataattctaaaacatgttaatgctctatttttttttgaagtgttctctgtgtgccaggcaccctcttggtgcattccttagcattatccccctctcccccttttgtgtttaactgatgtccacagagagaaaggccaaggtgatccagctgtcagagcagcatgggaactggtctgcttttcctaaaccactgctcttccgctgtccccatgttctcccgtggagggctgggaaacaccttacatggctgatggatcacgtgtggaaagtcagcgatgctgtgctctggtttccccttgttgcctttaaacagagcaagttaggaaatctggactttccactaaatattgaaaaattaactggcccatgtctgtagcttattctgaactataaatatctttagattagtacaaaaaggatgtttagctagctttttgagtgcaccatgaattttttcatggactaaggaatttacaattaaggtgtatgttggtgaagaaattactcagtgtaaatcagtcacagtgaaggaataaagcgaaatacatgaagttccatcttatttccagtgtttttgcttctgagggcatcctaaacagacttttaagtttgaagggtgttttagtttgctttcaattggtgtgacaaacaccctgaccaaaatcaagatggggaggatgcattacagtcccttatcaggggaagctgaggcaggaactaaaaccacccaggaccacctgctgggccaatcatccatcaagaaaatgctccgcagactggcctataggcagcctgatggaggttagtttctcccattgagtttcttctctctagataactaatttatgataggttggcaaaaaccaaaccagaacaacagggcacggcagcacactgtcgctttagtataggatttgttttcctgttggtaatttttgtttgcatggtccagtttctctctgtgttcaggaatgagtatctccatggcggttttcatggacctggtgtggaacactcttgctcctctcctcccatgactggtggctggtgctgaacagctcatttcagagagtgcgatgcttaagtgaggtgcagagcttggaatgtgggaagagagtcggtagggagaatacttacacgggaattacagagtccagactctccctgctttgtctcatatcctttgtattattggataccaaagtctgtctgtctttggtttagtcgcccttctgctcaggccttgatgaggacctgctgtttagcccaccgccaactgtagccttcggcactgcccctgtgccagcctgctgccttctcctcccctcccctcaggaacctcatgctatagccagaggctccccattgcccctttgggagggcgcctgcactttcttgccttctatcttctggtcctcaaccagtgctgacctttcccttcccctctcctgccccaggccagtcatctgttctcaaggtggcattggcattgataaccccaggcggttgtcactttgtagcagttacccagtgtagctgtccagcggccatgggtgaactgggtttacctgaaagcggggctggaaatgaaaggacgggtatgagagaagggcgaagccaagtcaaaggttcagagcttggctcaaagtttaattctgcagcaccaaacccatcttttgtttcagctggattatgttgcaaagtaagctcagcgggcagtctattcctctgaattcctgtaggaagttgcaggtgcagcaaggaggacgactccacctaggtcagaaagcccactgtggcacacactcaagatctgtttagcctgctcaaaaggctgggcgagggaagggcataacctaggactcggctagtcaggtggtgaaaatcatctgctagttggcattcctgtgaaggtcctgaaaacccagaggcatactctgagggaaggcgtcctggagactggatcgtgactggtggcagtgccaggatgcacacagacaacaccgtgtcctggtggtgtcttctaccccatctccctgcctgtttctgaggaacttagctgcatagtacttttcacaaattgaacatttaagttgagtcagtatgagagagcccgtgggccatgtgtgtgtaaatgaaggaaaacctctattttatctagtttggccagcagtgttcccagtgacgcagattgcctcctgttgcgtcagcacttgaattaaaaaggccctgtgccgccttctgaaccttaaccaagaagcacagactcgggccaaaaacaataatggtcagagttgccagcattcatcaaggctgattgtgtgcgcgcgcgcgtgtctgataagcgctacaggcaatactcatttaatccatggttgcaaagtagaagcattattactggaccatataaatgaggagaccagcagagaggaaaggcaggcctgagcagtaccctgtactagcatgaagcagaatcttccctccaagctcaaataacacaccaatttccacagacagcagaggccccgtggtgtcctctactccatggagataggaatctgatggttttgttcatgtagaaacataaaattctctctctctctgatctctgcaaatacagcagactgtccaggacaccaggacatgttgggtggtgcatatgtcgctgggctggcctggctctggtaattcctttttgtgagcacacatgggttcaggggtgattcatgcctatagtaccaagaggctgaggcaggaggattgccgtgagttgaaggacagtctggactacaactagtactgcttgggctccaagtgagaccctgttcagacaaacagtcggtttcctcctcttctcgagcctctctctgctggtaatgttagctggaggtgaagatgaccttaaccattcacacgatccaggcttatccaggaacaggccatcctgtttctctggaagcatggatgccatctcggcttttgcgtctttcttgggcttatctatcttccacgattttcagaatgttttaaaacaatactgtttcttaatatcaatgtatttgtttttaatagagtaatatcaatgtatttgtttttaatagaggagatgcatgctgagatctgttacgccgagtgtctcctacagaaagcagcactcacatttgtgcaggtaataaccgtctggctgaatactggggttgggcaggaagcctgccagcgctgtacagagcacggtaaatgttgctcagcctgtgttagcactgaagcttagagtggtaataaaagatatttgtttccgtcccctcccccccctgccccctccttcccctttcttacgttggtttccagacagggtctcactgtgtagccctggctgggctagaacttgtgaagatcacttgtccctgcctcccaagtgctggccactacctggaaagaacagtttttagaagttaaggagtcattatgaggccctacatttcacgctttacgtacacgtgtgtgccccaatgctgttagaagcatgggttttacattatgacccgatgatgactatgtcccgatgagggcgggagtagagatgataagccagcagaaaacagtctcagagtcttgattttgaaagttacttctccaggtttgtttgtttgtttgtttgtttaggtggtaatagtggtggtatttttcccatgttagcttagattcggttccgtaaaactgagtcagggtagtgtcctgttccccgaagccctgtacattaattacccaggcgggttgacggcattctcgccatgtcagtaacgtcacattgaatcacggaggcacctactcttctccctatgtgttttccaagtggggttttgaccggttttttaggtttaaactttgttttgtaactgaggagttgaactccaacctcttagaagtgtccactcctcctcctccctcatgtctgcttgtggttacttccgtgtatctgtgctttggctgggttaggatctgcagctccacccctttctcggtgctcccaccacctttgctcctgcagaggtactcataagctccgccccttccccgtgctcccaccacgaatcccggctcctgtagtggtgctcatcagctgctgaagggttggttgtacagcggctgagtgactgtccctggtttcttgttacttttcgtttatctcgcattctgtgattgattctcactcagaaaggagcctctgtcttgttatgttggtgttctgcttctgcattccgtggctttcttggactctgtcagggttctgtatcagagtatcacagattgggaaagtgtttccagggttgtcctcaggtgctactgatccttgctcacgcaggggtcaaagtggctcccctcccgctcggcccctttctcttctgcggtagtgctgtgttagctctcatctctgtactcgcagatggccccgcgtggtctttaatgcttcctggtgcgtccagttgaggtttcctttgcatataaacttcaggatcgctttgccttccttccccgagtctgtccttgtgttttcttggttttctggttgattccatgctccactttgtgttttcttgacaccccacgggtgtgtgcatgtccccatcgtggcgcgggtctccatcgtggcctgggcctaatcactcagcacatcatgttgcttttgcaatcaggtgcccatcacaaaataagcatttggtcagtgtttaccgaatcatggaatgaaataatcattagtttgatttttaatccagcccaagaaatttctttttggcttgtatatgaacttgtataaatataaataagatttttatttatattaatattttaaatatttaaaatttcttaatatcttaaaattttaatttcttaatattttaaatatgtaagataaaaatttcttagtatcttaaaataattcctaaataagaatataaacacttaagttgtatagtgaattttgtatttacagacttgtataaaaaataggaatgttaaatatttaagtagttaatgagactagtaaactaaaaatagtttttttgtttttgctttttggcttcaaaagtgtctgagatctttaggagtgtaagagtgtgggcctgtctctagtcagcaccattaacagaatgtctttcagttggttatttggtatatttattaggagactcttagagtgctgatcctagaaatgtcgttcatttggccaactgcctcgatttcatgagggatagccctcaagcccagagagataaaatagtcttcctcccccaaattgcatatcagtgacaaccgcttcagaatttagatcagtgtttttttttttttttttttttttcggggtgggggtggggcggtgtccgacaatttatacaagtgaaatttatagtgttggagttggagaggtggctcaggtgttaagaacattaactgctcttccagaggtcccaagtttagttcccagcaaccacacagtggctcacaaccatctgtgatgggatctgttgccctcttctggtgtttgaagagatagctcatacaaataaaagaaataaatctcttaaaaaaaaagaaatttacaatgttaagtagacttcttgcccacttgacaggagaactattattcactgggtatggtggatgtgaaggtttgtccttagaacacatttgtgtaaccagtgttctggggcccactgagcccagaagagtatttctcagtggatgatggtgtctactgaagtagcatttggccccaaatatttgaggattaattatgtccttagaaatacaaggtaagagaagctttttaaaaatgtgttttcactgacttcaagcttataagaaaattataaaatgacattgcaaatgcaaagcaagaatcatgtatcaaatgcagtcaaaatccagtatctggagctagggagcgagcttagtggtagcgtgttcctttacccagcatgctctaggctctattcacagcaggaagtgctctctctctctctctctctctctctctctctctctctctcacacacacacacacacacacacacacacacacacacttacttcttagttcacaaatacatactgtttaactttccccctaactgctctaattatttaattgtattattttcaggatgaaaatatgatcaacttcatcaaaggtggactcaaaattagaacaagttaccaaatatataagtaagttataaagtaaaatgtgactgaaatcgatactaaattaaatatttttgaagatgggctcttattctatagccaggctaccctggaacttttgatttttctgcctcagattcctaagtgttggggttattattactaccccactaagattggcttttaaaaagattctctcctaagaatatttgtatattttttaaaatttatattgctatttatgtattgtgttttttagcacaggctggctttacatctctcattctcctgcctcagactttggagtgctaggattacaaacacatgccactacatttggcttgctttaataaaatctttcgccgggcagtggtggcgcacgcctttaatcccaacacttgggaggcagaggcaggtggatttctgagttcgaggccagcctggtctacacagtgagttccaggacagccagggctacacagagaaaccctgtctcaaaaaacaaacaaacaaacaaaactttcaaaaacatctactataattttatgtctctagtttttgtggttagtgtagtgattataatgtccttcttggcttattaccatcaacttagagttaatacagtactgttgtgtgcaaaatgtaagagctttgtaaaaacgtagtttcatttgccaccagttggcctttgctctagctcctttctgttgctgtgataaaacactctaatcaaaagcaccttaggggaggaaagggcttccttgactcacattccaggccacagtcctacactgggggaagtgagagcaggagctcaagcaagaacttgaagcagaaacagtgaagaaataatgcttgctggcttatgtgtgggctcatacttagcttgcttacacagcccaggaccttcctatggaatgatgctcccacagtgggctgcgtcttcctgcagcaattagtaatcaagacaatctcccacagaattgctctcaggccaatctgttcttgataatcccttagtcgagactcccttctctggtgactctaggctgtgtcaagatgaccatttataggacagctttttttttttttaaactattcttagggtgtgttctgtatgtgttatcattaaatgcataataagcaccattgttttggtttaggtacctttgtcttacttactctgttctgcttaccaaatacttgccattgtttctgttcatgtttaggctgatgagcccccgttagcatttctcatagcatcaactttcagcatttttcttctgttctcgttgttttgaaaaccagtttattttggcctttaccttcaagggtattcgtgctacatagagtattctgaattgttagggtatttcttttttcagccctttaaaaccagctcttcatctcatcagttcttgtattgtttaggactcagctgtttgtgtaattgtttcatatgtttaatgtatcatttttctcatctccttaaagagcatgttgtatctttgagtttgagcagtttaatgtggatgtagacttttgttgccataatttccataagtttgtttctccttcattgtttctcactcatttcttgcgaacttccaattactcactggtcagcctcattgtgttcagtaagttacatacagatccacacccacttatttattttttattggatccagcatgtgggtcatcttggagtcaatttctatttattgctttttctgttgactgtgtgtcatgctctcatgtggaataattttaaagtcatatcctagagattgatgtatttgtagagacgctgggttctgtcatctttgaagtgtgccaggcttttctctgggaagcattttgtttgctcaggctcaggctcaggctccagagtcttccagttgctgggacattgctcctgctgcctcttggaccctcccccagtcacatagctcttggattagccaggactgccgtgttcttctgatatagactttggtttacccactagtgtagttctctcatttgtggaaatgtccttatagctacccaacctttctctctgtctcggattctatcttttaatccagggagactaaatggcttcctgattgtggtctgtggtccccatagggagtggagcatgctttcaggcccatagatgcgtagatagattgatataaagttaattcatgagctgcttcctgctttcggaaggggcctactcccccagaaccttccatttccaagcctgcaaaaatgttttaaatctattttttttgtgtgtattttttcagggtttacaattgttatgtgtgggaaagcaaacctaacctaagcatcctagcatcactgggaatgcatcccaccactagatgcagagccccattggtattttaagaggcgcttttaccagtactcatgtaaacctggaatccataagaaaataatcctgcaagagggagtagagttgggaaactcattatgatgtttttagatttcctttcaaagtactttttagaagattaaagagttgattgcttttctaatcatcagaactttaaaaagctagtttaggtagtcctatggtaggtagaagagacacctgcatcagagcagtggcggggctttgagagaggcctcggtgtgtgtgcgcgtgtgtgtgcgtgtgtgtgtgcatgtgcatgtacttctacatataaatgtttcgttagaagttcacactacactgaaatcctacttatacgtaaatcctttcaaaatagtggagaaagaaatatattttaagtaaatttttttggaaaactgttataaggtaaaaccaccattaatacagaaataaatttcaattaagatttagtattttaaaattttattttctcaggagacagaggcaggcagatctttgagttcaaggttagcctggtctatagagtgagttctagaacagtcaggactacacagggaaaccttgtctcaaaaacaacaaaacaaaacaaaacaaaaatttaagttattagcaaaggacatagggaaatattctgtgttcttagaattaaaagcttggggctggagacatatcccagaggctaagagtattcactgatttgtctaaggatcacagtttgtatctcagcacttacactaggtggcttgcgagtccatgcagtttcatctgcaggcaatcagaggctccttgtgtgtgacacataacacaaacacaacacacagcacacagcacacagacaacacacatgctaaaatcttaaaagttaagctttttttaaaacaattttttattaaatattttcttcatttacatttcaaatgctatcctgaacgtccctataccccgccctgttccccaacccactcccgcttcctggccctggcattcccctgtactgaggcatataataaaagttaagcttttaaacatatgtaacgttctactttgaaacaatttgttattattataaataattttcatatatcttttattcggacttacaaatataagcatcctacaaaataaaaagctcaattatagtttaaaatcagcttttaaactttcattaaaaaatttcattcagcggggcttggtggctcacgcctttaatcccagcacttgggaggcagaggcaggcggatttctgagttcgaggccagcctggtctacagagtgagttctaggacagccagggctacacagagaaaccctgtctcgaaaaacaacaaaacaaaacaaaacaaaacaaaacaaaacaacaacaacaaaaaacccaccaaaaaaaattcattcagaggcctggaatgactcagtggttaaaagtgcaactgctctttcaattgacccaagttcagttccgtattaggtggttcacattcataacttctgatcccatatctccggcttccccaggaatctctgcacacagtaatacacccatgtgcagacagacactacacgcaattaatttttaaaacaatttcttcttttgggatatttgtcattataaagaattttcatagatctttcgtttaaattcaaaaatacatagtacataactacagctcagttattaaaatggcatctgctgccttgacagcatccatctgtccctgttcccatagtgctcctttttctagggtctaacccgggattcacttttagttgtcatatccccttaatatctgtctgttttgagaccggtctcactctgtagcccactctagccttgaacttactccatagcccaggctgactttaaatatctggaaatcaccatcttcagcctcctgagtgctagggttacaagcatgtgccactgtgcttagggcagatgacagcatggcatggtcataagttggaaggagtctgaagcaaattagttcctctggtcagttaacacttcctcctataaaccaggtcagctctgagctggctagatttggctggaatgcatcataagggaacatagctgcattatattgggatagaagatacctggtgataccttgttattttgttgggttgctcttggggcactggggatggaacccagggccctgtggatgctgccccgtgtcctgccactgaaatacatcttctttgttacttggtaactggctatttcccagttccgtaagcagttatcacttattgctaatttatgtgcctttgattatttgtcttttgaagatgatctgaggtctggggatgtagcttagtagtagagtattttccttatgtatgtgagccattggttcagtccctaccaccaccacccccactcccccacctccttccctacccctttgcttcggtaaggttaaatgacaccattgtgatgggagtggcctcagcaagctctgatgtatctgtgagcccatggcagctgcatggaattgaaatgttattgccagagcatccatgtttgagggttaaaggcagggctgtgaagtttgcatggccgcagagacctgcacactcccgaagtctcctggcaaatgctccgggggagctgcgagatcgaagccctcaggttccatggctcctaaattgtgcttgctgatggctgatccctctgtcactgtaaaaatgggtgtttcctttcttcttagtgggaattactcagtagccttaggagcggactagcttaaattgttagtttgcatttgtatagtattttaggtaatgacatttacagtatacaagggtaacattggtttgacgtttctttgtcaagagtcatgggaaactaattctctacgctttttcctcactccagagagtgcctttccatcctgcacgtcattcagaagaacaaacaagagcagcacttcttctatgagtttgagggaggagtcaagcttggaacgggggcctttaatttggtaaggaaagaattctatagaaaccagaaccttttgtaggtgaaaccaagggtccggcatctctcctctgggtttgaacttcatcccagacctccacctgtgttggctgatgagtcgctggggtggactggttttcctgtgcggtgaaggctacagcgttctgtatatgctcagagtagctttgcgctttccatcacacagggcaagggaagcgcgcagcactctgattggactagtaaggcctttagtaacgaggagcctagaatccagttctgtttgtgcatcggaaatatttatggtcgtgttaatgatggctctggaggtgaaaacgggagggagtgatataatttgagaagcaattgttgaagatctctagggagatgcagagtcagtaagactgtcagagtacaatgttatttagaaatctggaattttaacaaaggtttaactcattggaaaatgaagtagtgaaagagtcatattttgagcatgtagtccccagggctatgttcacgagcccgtgtgcagtagtcagtgctggggttgagggtggactgattctccccatggactgtgcctgtctgtctgcttggctgttaaacctcaccattcacctgggacgcagtatctcccattcagagagatatttccaaaccctcttctacctgagcctctggccgtctagccctaccccactggctatctccatgagttggtatttagtcacttctgagagactgttttccactgtccttcaggggtgtcccagaaggcaccgggctgctgtggctgcccagttctgtttgtgctggagtatcacccacatctccttaggtttgtaccttccagaaaggaagctgaaggaaactttgcctaaaccaggcatggacactcatgtctgtaatccagcacttgatctgtaggagggcactggaagttcaaggccagcttaagctacagatgagacccgatctcaacaaaacaaagtaaaatggaaaggaagaaagaagccttgcccgagatgcctttcatgtcacttcatttcacagaagacccaagtcactgtttagaggaccacggagatgccagactttattgtctccttactgagtcctagtcaggttagacttgatttggcttccagggcttttgaacaggttagggttagccactggcagcctatagtcagcctcacacataagctcactcacgtgggctgtctgtagtcagagtctaacatgccagtgcacttacatctctatttttccttacagatgctctctcttttaccagcaagaatcatccggttactagaatttattggattttctggaaacagggtaaaagttgcattttgttttaattttgaagaaatttctgttgttctctgttatagtgatcttctccacccagcttcttttcaaatggtgttctctgaagagtgcctcttttcttggtttgagataaatactatctcttccacggagtattctcccatacttccccaaatgaggcgcaagtgttcctaacgttcagattcatgcattcacctagccgatggtgctcactctggtcccataaaattgtgagttcctgttccaccttccctgttgggcggcggggtctctgtaggcatagaatcctgtgttcttgaccatcacagtacattgagcttgaaactcagtatggtcttctgtggtgatagggatgaaacccaggcctggttttacccgtgcttgggtaagtgctctaccattgagacaagcccctagcagctcagaatgtaaatcggaaattttatcagagaaaaatacagcattacttgggaatgagccgtttattcctctccgtagaatcacataatcaacatggatcagtttgataacagttgctatgatgaaacactgtgaacgaaaaccatggaggggaggaaagggttgatttcgtcttgtacttccaggtttcagtccattgtgaggtcagggactaaaggcaggggcctggaggaaggagctgtgagggaagtctgtctgctgacttgccatcctgcttgcttatgtataggctcatgtttagctatctttcttgtacagccccgcaccacctgcctagggattggtgctactcacagtgggcggtcttcttgcatcaagcatgatcctccaaaggcatggacaggccagtctgagctaggcaattcctcagtgtgagctttcctctcagatgactctgggctgtattaagtggacaactggagctgattgggacagttatgaaaggatctatcagatagtcttatgccagtttaaactgtgacgattgtttctatttaaatactgccattattctaagctggtgaaaaatgaaaccccaagtttatggagtgcaggacggatgaatgatgtgagaatttccaaatgtagttttttgtcagtcagatttttctctctctgtaatgcaattactatctgcaggacctaggccttctgcagctccgggaaggcgcatcaggaagcagcatgcggtccccgctctgttgccttaccatcctggccttccatacctacatctccctcattctcggtaagagttgggtcgtcgctgtctgcttactttgaatttttgagttggatgaaagatggtgagatttatcatagagatctttggcagagacagttgacggattgttttcactgagcagtttagaagtcatttatatgcatgtatgttatttattttgtgcctatgagcattttgtctgcatgtgtatcagtgtaccacgtgcatgccttgtgtccacagaggccagaagaggcattagatctcctggtactggagttacggatggttgtgaggtgccatgtgggtgctaagaattaaacttctctttaagagcagccaacgctctcattattgagccgtgtgatgtctcatgacattttaaaatctgttcttagataagatttatgtattaggtggctgtattttttttttaccacattagtgttagtatttccattttttttttaattttgtagaaaattaaatttagaggtagtgttgtcttgaaaagttcaaatgtcaatgagacggcagcctccattctttttttttttttttttttttttggttttccgagacagggtttttctgtgtagccctggctgtcctggaactcactctgtagaccaggctggcctcgaactcagaaatccgcctgcctctgcctcccgagtgctgtgattaaaggcgtgcgccaccacgcccggcgtccgcctccgttcttgagacttgtctgagacagccaactccattcttaaattgtctgccctggagctctttgatccacacccttctcagatgaaaacacaaaacaatcatttctattctgtccacgggtgtgtgctgtgtgtgtatcagtgagagctgggaattggttgtaaatgtgcactattggttgtttcgtgagcactgagcactgtctgttcaatttctaggtacaggagaagtgaatgttgtggaagcagagagtctcctcgctccgttccttcaacagttcccaaatgtacgcttactgttccattgtctgcctcagccgtgactcacagccgccatgtctgttgaagagtgttctttcctctctccacagggctccctcatactcttctatcatgcccgaatcgagctgctcaaagggaacactgaaaaggtagctgtgtcagcaagggttatttaagggcagtgtctgagtgggggttgcgtcacacggacacacagtataagtaaatttggttgtgtgcactagcagagataaaaggaatgtgattctgagaagctaagcttttactttgtgcacgtatgttttcacacttagtaacttgcctcaaaatatgtttacacatatgtgaagtagttcttggtggagtatataaaatattttttaaaagaatgtgtaaaacaatacattttattatgggcatctaagaggcttcagagaacgttgatcattatctattcttgcattgattttggaacctatcttttacatatgatgcaactatactggttcctcatcaaaggaactaggcgattaattctcttaaagccaaacagaagtgtgtgtgtgtgtatgtctatgatgtccttccataaaaataagatcaaccttttttttctatttatattaaaccgcagacctaccttccagatcatacatttaagtctccctttgttcattttgagggctgggcttcctttttccgagatggctattttatacttattaaagtaatctgctgttggtgactggccactaaacatttctgtgcacaaaaatacggatatagaatcctgggtcagatgatgcttgcatctttggcatccaggcaaattgcctttctcgagaatctttcgatgtaaatgtctgtacagaaatagtgaacaggctggagagatgccacagtgcttacgagcccttgctgttcttgcagaggacccaggtgggttcccagcagctgtgtcatgcagctcacaccagcctctgctcggcttccaagggatctaacaccctctcctggcctctgtaggcaccaggcatgcatgtggtacacatatacaatgcaggcactcacttgcatatacacataaaaaaagaagctttaaacatgtgattctatatttatatatctatatttatatctagtgttctttgtcaacttgggacatatctgtcctttaattttttgcccatgggataagtgtaaaaaaagaatttaaatttttacttaattctattattactatcattatttgttgtgctggtcaaatctagggctgggcaagtgctttgccactaagctacattcctatgcaaactttcaaatttgtgaatttgttacatgtttattaattattctttcccccccctgacttgcctggttacatctttaccaatttttcttagctaaccttttgctgattatgtaggcaatagccttctctttgcctttccaaagatccttatgctattatactctatgttttatgaaagaactttggcatttctatcttacttggcaagtggctttcttattcctgagttataaagtacaaggtcccctcactaagtgaaataaagcaacagaatccaaccgtattgtcacacgttaaggaagagaacgtaatggtatattgagtggcttaatgagtggtgattttgttctttttgtacaaagtgttttatgtatttcccattgggttattatctccttgtctgatatctgggtaatcagctttacgcaattgacttataggctcaagaaacatttcgaaagtgcatttcagttcaagaagagtggaaacagtttcaccatctctgttactgggaattaatgtggattcatatataccaacaaaattggatgcaggcgtattactattcagacctactttgcaaagagagtaaatggtccaaggtaagctccctgcttttctcacgtcctcggtttgctacatggccacggtggtttgtcatttaagattgattttttttaagagtacagcatggatattttcctcagtttaaagctggaggaggaggaaggggggaggaggaggaagaggaggaggaggaggaggaggaggaggaagaggaggaggaggaggaggaggaggaggaggaggaggaggagatagaccacactccaggcaggatgttgctaggatgtaattgcaggtgctgtcctctaagcgtcctccctggtgactcagccttggagacgcctgcatggtttctaggtgatttctggtttgcaaggttagaatgccacgttcatatgagtgctctcttacgagccccatctttttccccctaaaggcaacatatgtgttcttgaaagctgctattttgagcatgcttccagaggaagaagtggcagcgactaaggagaatgtggtgtctctgtttaggtgagcatgatactgtttctgtcacagagaccctgggggtgttaatacacatctgaattttcccttcatgttcttttttttttttcctttttaaagatttatttatttattatatgtaagtacatttagctgtcttcagacactccagaagagggcatcagatctcattacagatggttgtgagccaccatgtggttgctgggatttgaactcaggacctctggaagagaagtcagtgctcttaaccgctgagccatctctgcagccccctcccttcatgttctacttcattagtttgtaacttctctactcaccggtatggtcacacttcgaataatgaatttggctgagagccagcatggattctttagcatggtttcagatacattttcatgtctgggaatcatgagaatagcattacacttgttttctagaattagggtttagtttcaggggctctgcacctgctctctcgcggccattggggtctttcagggatgcaattggatatttccttgaatcctttcccttgcttatgcattcatagaattgtgcataagaagcgaccccacaaacatgtagtctctcttcacccatgtgtttagattgtgtgtgttgtatgtacacatcatgtgtaggcatgtatgtgtgcaaacctgtacatgtgcagaggacagaggatggcatcaggtgccccccactctacactctctgccctattccctctagacagggtgttactgaacctcgagccagacggttggccagcaaatctcaggggccttcccacctcactgggttacaggcattgtgcacgaaccagcctgggttccgagcatttgaactcagttctcgcttgcaggccagcacgcttgcttgccgagccatcttccggccccagattccttagaccttagaaaacactgaatcctaaagggattatttacaaagtcacctatgtttgcttagctttctcaggttatgcatatggatggctatcttttgagacatattatgttataggtccatggatggcttatgttatagatctgcgcagcagctgcagacagtaacaggacatttacccctttacattcttctgtcttgctggataaagactttgagctcttttctgcttatttatggaaattgacaattttatacctagattagcctggactgtgtttgaccaatgtaagatattagctaagctgaaggaaatatgtcagttagtggctctcatggaatcaatcgggtacccacattacttgaatgtgtgtcaccatccagagctctgtcccttcctgaggacttcccactcaggtcggggtattgcccaaaaacgtgcatttggaacagtttctcggctgctactagcctgtgatgttgtctgaaagcctcagttgtgactaataagtatgctcactgcctttccatggggaccttcacagacaggtggatggtctgaagcagagaatcgcggggaaatctctcccaacagagaagttcgctgtgaggaaggcgcggaggtactcacccccgtcaggcgtccccggaaagctggtgatgccagccctggtactgcttttactcactgtttacctaccagagataaggtcactgttgggagcatcgagggatgcacttacctttgcttgtgaagtttatagctcagttgagaactattatgtatttttatatttatacgtaaactagttttaaaataaattgaaaattttatctgatgtgttttgactagttagtatgttctagctattgtgataaaggcaacttcaaaaaatcattttgaataaagtggaattgaattacaaaatatcacaaattcaattttccattttttaatagctatgtaaaaaggtaaaagggaaccttgaaagcataacttttcacggatatagctcgtttgacctgggcatggcggcttatacctgtactcctagaacttgggtagctgaggccagagaattgccacacatttgaggccagcctgggcctcagagtgatttccagaccagtcgggactataaagtgagactgtcttacaaaaccagctgccttctccacccctaaaatattatgtctaacccatgtaaacaaaacgttgccattttgatgtagaattgtaaataagagaaaacatcctggagccgtgccctcctgtggacatgggtctcccaccgcaagcagcgtcctttggaccagccctgctgtgctgcagtgggagccctgctgtgctacagtgggagccctgctgtgctgcagtgggagccctgctgtgctgcagtgggagccctgctgtgctgcagtgggagccctgctgtgctgcagtgggagccctgctgtgctgcagtgggagccctgctgtgctgcagtgggagccatgctgtgctgcagggctggaggggctctggtcctacttgagctcaccctcctaatcacctcactgttttggcaaagcccctgtgaaaaacacaatttgacttggattttcaaaacaaagctttctttttcaaggatagctgttcagtgcacaaaggcaccccagttctcctgtgtggttttaggaaccttttttttttatttaggggattatttaaccattctcctttgagtgttatgtagtgttttccagtttttactgtcataagcatgctacaatgaacatcatttacacgtacatgtaattaattctctaggaatgttttcaaagaaatggaattcttagtgaaagatgttgtgttaatgttgggtatataatgctaaatttctaaccccctagccccccaaaagcccctgtatcgattcagatgacggataatcttttcctaacttgcattctgcgctgccacgctgagttctttatgtgcatgctcactcagctttcctttctctatgtatttttaagaggactaagaatttagcccctgaccggggtcagataggagccagcctacagctagcctagaccgaggtgtttcccacagaaccccaagattacactgatggggtgaggtagaaatgggcctgtgatcatgtcctgagcatagacaataacaagaacgctgtgctacacggaggctcctaggcccctctcctagttgatgcccatgttgcttaattagctttagttctctcccacattctttttatattaagtgctctgcactgggaagggttctctatgtcaaagaaccttccagaaactttaccgagccattgtatttctttgtctacgttagaacttagaccctggtatgtatacgacccacttgtgctttgaaccactgactgttggtgggtgtgtagtgacaaagaattgactagaattgctcatacctagggttcttgtcacagcctggttttcataaaaatctcaaaccaagcttgcctcgccctttgataaatattaagtcaataagaaactttaaatcatcatcagtttaaaaataacattattgaattgtgctcctagcttccaggaccataaaacaaatctgacaccatcatttcctgcctcatgtctgtggctgctctgctaaggggactctcaaataatatctgtcgtaacttaaaattcatgctcatcatagatccttcaaaatatgaacggcactatctggacattagaaaaatattttcaagcaaaaacacatttgcttttgatccaaaaaaaattctcctgtgctagcccattaaatgtaatctgctaggaagagtcattagtttacatttcagggactgtcactcagccatatggcctttaaacaagcgccatttctgcatattggagcgcattactgggccgacacatgtttttaatgatataaaagaacctgagcccagtaaaataaatattccaatgatcatttctaacgatatgcttggaaacactttatgtaaacaagtggcagacattttaaaatatttccctttacttaaaagtaacaacagaaatttacattaaacaaaattgttcatagtgtcagtttaaaatactgttttccttccgtgtctatattgtatccaaggattgtatgctagagataattagtatttgtttgttgaatgaatcaatgaatgattttttagtaagagtataagataattgcttacttaccttagagcataaaagacaaaaggatatagtaaaccaggggaaattatgccactaaattccaaacaaggaaaggttaggaccaaatcctgacggtcctgttgaggttttcagcaacacctcacgtagctgccgatggtttttcatccttactccttaggaaatgatgtacgtctggaatggcttttcaatagtgggaaaaaggaaggacctttctgaaaatctcttggtgactgtggagaaggctgaggaggcattgcagaatcaaggtaagtgtgcgggcccaggccctgtgtctgctctccttcctcgcctgtgtctccccggtgcacatgtgcctgccttgatctgtgtgcatctcacgagcccaccttgatctgtgtacatctcacgagcccaccttgatctgtgcgcatctcacgagcaaggcttcagcttgtgcttgtcatcaagataaagagacagcacctcgttacatcagtgagtcttgagaacctacctctaaacaaagggcatgtgccacaaaagaccatggtataggatgagactccatttttatagtctagccatgaccagtgtttaaaggaagggtcagtcagcatctttgtttttaaggagcagctcttcttagtctttttcggctactgtaacaggataccataggttgggtaatttataaagaaaaaaaaaaaggatttttttttttctcagatgtggagactagtgggtgctgaatcaaggtgctaggacggaccaggactttcttactgccctgtaacgtggcagagggcatggcgtggggagagactgaggcacacagcacacatcaccattctcttcaagttcctacctctcatcattgtctcagtaacagttaaatctcaatggttttgaaggggacactcaagcagttagcactactgtcctgggctgtgagtggctccattgtcttatacttaggtccacaatacatcccacccgctctctggactccatggacaccaggcatgcatgtgagacacacacacacacacacacacacacacacacacacacacacacacacacacacacagaggcaaaacactcgaataaaacaaaacaaaatggtagcccatctaatggtaatctttgctattttattgagaagttattttaaaaagaaaaatgttttattttattttgaaatcgacagaactgaatcattttgaaattgaaataaaatggaagtatgttagagtttacctttaaaataagacgtaggggctggagagatggcttctttttaagtagttacgaattcttgctactcttgcggaggacctgggtttaattcccatcacccatatggtagcttataactgcctgctgatctgatcccctcagtgtgtgcattagacatgcaggtggtggtacacattacatgcaggcagagcactctcacacacacaaaataaataccactatttttttaaatggggttccatgagataggcttctcaaaaaaatttaaaattttgaacaaatttggtagttctcattgttgatcagtgaatttgacaaatttaataatttgctcattcaaacttccatagctgacatagacagaataggggaagaaagatagctcttgctgttgtgggagttatctagattaaagcccacatacccacaaattaaaaggatgaatgaatgtttatgtggaaacaggaaagcaaaggagacacttttgcaggattatgtgggaacaggtgtagggcatccccccccccccagcactgcctctctgtcccctgcttccccaggctctgtaggtgaaccctcaacctctgtgatgtgctgttgtatcctcctgaccctcaagagtgggtcctttgtcagtcacatttgcaaacaagcagtggctttttcttggaacagactcgttaccctcaggttgttttgctctccattgtttggagaagaactaaagaagtaatgcttgcatcatatgctcataccgggaagtggttagaaacccaaagcactgcctttctgtttctgtttctaatggcatcttcagatgagagatccgagcaacttctgggcagatgagctgagactccagcagacacaccaggcttgccacaattctgtcctgtgtttctcctgggtgaaagaacttgtttattgtcaaggtcaccagttcctgcagattaagtttctaatgagttttaggaccattgttctatgtaggaacattatcttctccgaccctaaactcctgacttagtaattaagctcctgttctccagattgaggggtggggaatctgtgattggaaaattgagttaagttataagcctgaggttgtgtgggcttccacccagcccatattcatagatatcagaatgtggtttggttttgtggctcaaaaacagggtaggagggtaccagtgaccctactgtagtaactgggcacagtgagtcaaggttggccaaccacacaaagggctcagcctagcgcactcggaggcacgctcagccttggtcggcatgtggtattaatttctgtaccgtttcctttggaagtctaaacaaatccatcatgtacccagaagttggcagcagatccactttgtctatccttgcagttaatttgtgtggcgacattatatagcaaacagaatcagttacatgaagggattgcagtctggtggcctttcacgtttcagtcagcttccacgtttcctgcttggtgcgatccagcaagtttctaaaatacgcagcgtagatatttttgtagttcttaagcttccttctttcttggcctgcccacagttaggacactcagcccctcactgtgctgcacatacacttgggcatcgttaccatgattgaaaaaaaaaaaaaacaaaaaaaccccacttttcaaacagtatcatttctctatgtgtgtgtggttgtcagaggacatttgtgacactggtacttttcttctaccatgtgggtccttgggatcaaacccaggtcatcacccttagtggcagtcgccttcaccggcaaagccgtatcgcctgtcttgttgcagtgatatatatatatttttaaattccaattgaagatggaaactattgaaatcttcctctttcatgagactttgaatcatgacagggagtgatcatgtgacgacagtgtactatggtcagaggagtctgtggttttgcttctgaggtttgtgtcggatgtgggatataaacccctctgtcaaattgctaacttaagatccccacagagtgactttactggtttttcaatggtagttgtctgtggcacctcaaaaaccataattcactgagcaagcagatgttgtcacgacacaaactgtcagaaaactacttctcaaagttcaataggatacacagcagtgacactaaaatccagtgtcctgtgtgggtcttaaggctttgggctaagggccgactgaccttttcgtagacatctctgagagaagcatgggttgggtgtagggaaaggtagctctaagtagtgggaaaggttagaggtgttggcatccgtgggctttctagtgacgtgtcagcacttgatagttagaagtgaatctcaaatgtttaaacacttagaagtgaagtgagccccttctagctgggtgagtggcactgttaacctctaataggtgagggctttataagctgaaacaccagcacatgtcactggtgaggtctgagccttgaccctgaagcatgagcctttcaatctggggacgttcagagtctgctcagttcccttcaccacccctccacactgtcacagcctgagacgtgtaaattagcagtctgtcttggaatagcttcttcacatgtcacccgcaaaagaaaaaaagcaggaaagccctcacgcatggagcgcatggcatggctacctttgtcacacagccaccgccccattcgatgcgactcactctgcctcatacgcccaaactgagctggagacaggggtccgggtggggaaggaaggccctgacattctaggagcatgggggttcgtgggggcttggggtgcctcgcccacgtttcggaaccatttcacggcataacttccccccaaaagaacataacctgggagaactgctaggttgtaaacataatgatctggaagagaggtttctgcttcctgcattttgaacgggtgggaggccatctgcttctccatatggaagcgctatcctctcctgcacgggtgccagcagagttagaagccaaaaccacaggaggagacagcctggctcctcccttcacctctgagagaattaatggagctcattctttatgtagagttcagatttcctgtcgtagctaaggccacaggattcaggatgaccacctgaaaactctgcctgtgaacacagcgtaagaaatgctggtgattgagagagttcaatgctcttctcagcaagggtttgcagtgtgtcgtgagttaacaaacgtgtttgtgaatggtccccttaaagcccaacatcagttagttttcctctcagttcggagttttttgaaagcatttttggactggaggtgcagggcagcccagagtgtctgcctcgtaaagatggggctctagcatccatcgcagacaccatgcaaacaatgagctttcccccttccgtctatgcttcttgttttaagactttactgactactctgtggatgatgaatgcttggtgaaattactgaaaggatgctgcctcaagaacttggagcggcccttgcaagctgagctgtgtttcaaccacgttgtggaaaggtaagaggcagcccgaggacaggtggtggcttcaggggaatctgtgggacaaaggggtgccccgagcctttaacctcatgaacagatctgcggtttgtttggaatatggctttacgttatttccactcactgcttaaagatgactgctaaatgtaaacttagagccaggctgacagtcgctaagcgttggctgtaaactactgaggctctcaaactcacttggtctctatcacttcctgtggggtgtgtgtgtgtgtgtgtgtgtgtgtgtgtgtgagagagagatggtgatttggcagggaagagaggtgaaaatactgctccttgttttttcccacaggacatttcttctgtgtatggtgatctttgttttacagcaatgacagtactgtcctgatacttttcagagagttggagcaagggtgactgcctgtcagtaaactggtgaccactgtgttctaatggctgtgactactcactctgcacagtgtgggcccaggagcagggctccctacttcttttcataaagaacctgaaaactgcatctaatgtcaggtctcctgggttttaaatattttgttcaatatttttgaaaagactgcaagccaaaaagatagaggccattcagtgtgccacctgatgccttctttcccaggtcacgtgccttcccattaacagccacttggactcctccctcatgacagtatttatgagaatgtaggacacggaatcttgttccccaataaggtaatttggtgtattcgcagctctagtttattggcattttcctaatgttcaagggccggccacttgctgaatttcacagggaatcattgactggtgtggtttacaatgtttgaattgtgcagtcaccttaggtggggttaagttgaagaggagacctcctacaccacccacctcggcttctgcgcaagccacttttgtgttaatatcattgttcagcacagttcttggaactctagagcaagggacatttgaaatgcaagtttccgtgaggactggcctcttgatggttaatttccaaagagatatgctttttgttttttcttcatgccagaagtataggcaaaaggtcatctgtcttgtcccttgccagcaagagagtttcttctggtccatactctctccaaaagatgcatcctcttttccaagctgaaggtccagccacctgctgtctgtgggtttagggcttcatcttcttcatggccaccaagacacaagtcttaggtctctgcataaccatgtctccttccacacaactgtctcctcttacttctttgagactagttttggttatagcctgataaactgaaattaatctgacacagaattagacaagtcagcaaacagagtagccattcagaatggaaactgtagagtatcacattgcattttgtacttttaaaaaaagacttatttattttatgtattcaagtacactgtagctctcttcagacacaccagaagaggggcgtcagatcccattacagatggttgtgagccaccatgtggtttctggaaattgaactcaggagctctggaagagcaggcagtgctcctaactgctgagccatctcttcagcccacattttgtatttttgataatgagtatatttgtatgcatgtatctgccaccaaaagtgaaaaaatccattatagtttgaactacagaaacagttcgctctagatttaaaacactgttgttaactcaacctttttcctgggcttctagttttcataatgatgctgaaacaagactactagccacccagtcactgacattttgaagaattctaagaccaagtatgaagggaattgatgcttaattaaacacataaaccagtgcaagttccttactcctacatttagaatcacatgctcctgaagatgatcttgtcaactctgggttcatcttattgaaggtctgtgtgtatcggttgccctgagaggttgtgtgtgtggtgccagtgctggccttacctaaggaacagaagattagtgttgtgcacttccttccatatgttgtgaggcctcgtatctgtgaggcagcatccttcctccgatggcagtctcgatgttgtctgggaaatgaagagtgatgtgcgtctgaggtgatgccttttgtgttcttttaagacttaattgattttcatttgctcttttagtgaaaaactattgaagtacgaccactatctggtgccatttacgctgtttgagttggcatttttgtataaaagccaaggggaaattgacaaggccatcaaggtcctagaaactgcaaggtgagtcctgaaggtaacttgccctgtggccttgaagtgggagacatcagtgctattgcaacagcagcagtgactgattccttaaggccagtgagccaatgcaggttcagcacggttgcttttgctaatttaggctgtgggcttttgctggagttgtgctatttcctgccttagtccactgctctgtggctacctgcagatgtgattgtgtgcacctagctaactgaccagcttcagcatattgtcttctgtatcaggagtcagcacacttctctgcaaacgaccaagcagtaggtatctgggcctcagagtgggcactggctttagagccataaactgtccatctattgtatgcacttaatccactgtatgtacctgtaatgtggaagggaaggggagaatgggcgtgttcagagctgctctttgggtcatagttttctgaccaacaaatactgtcatataagtcatatctgacatttcctgaagagcttccaatcatgtgatctttccctgcattcatttttcgcttctatggcaggtctaagtgtcttttgtcatttctgctagatagtgactcagacttgtgatcatggcactttttcagcaagacaaaacctgtagtctgtttgaagaatgccatacaggtcagttgagtgtagtagctcacacacaagtgtaatccctactctaatcccaggcagtaggaacattgccacaaacgtgaagctagcctgggctacaaagtgagaccttgagtcaaaaacaaatacaaacagacagtgagatcttgtgttgaaaacaaaacaaaacaaaaaaaccaaagcaaaaagttctgggtcataaatagcttagtagtcactgttacttcttcctgttcactgagtgcctgttatatatatgccaggtcagtgaaggccatggagggctgctgtgagctcagcggggaatgccctgcagggctagctgaagagagatcagagactcgagatgtacggtgttgatctggggtgcctggatgttaactgagttgagagtctttggaggaggagacagtgtagttgacacctgtgtaagtaggctagttttggaaaggtgggtcaccaggtcatcctgcacaggatgtggctgtggagcccctgggttaggcagtgtggttagtgggtggacagtggtggtttatactagctacgggaaccctcagagcagcagggttttgggaggaaagagacacagcgctcagggctgcagtactttgtggtggctgctcaggatccacatggagagggtgagctggctggccacaagatatgcagccgttttcagggccacatggacaggagccaaagtccccagcactgagtgtcatagtcaaagccattgttcctgaggtcattagggaaagcgtcagagctggagctggaggccccatatagcccctggagcattccagtctagacattaagttgtaagagttggacacttaagatcttagagttaagaggatggtccgttgctgtttaacttctacagatgtcaatgtttaattaaagttgtttcagaacagtgaggtgcagcacgtggctcagagagtcaagaacgagcccgtaaacctgaagaccagagttcttttctagaaggaaaagaatgagcttcatcgagttgttctctgacctcctcacaggctctgtggcattgcctacacccatacaacaggacatacacccagtgataacaatgacaaaatcaacacggaccctctaaattcatacaagtggtcgtcagctaagaaagttcagatatgagaaggcaaacattccttagaatgggtgccagctgccaaacagcataagaccagaactatagaggtcatgggtgaccatgacagggaggtgggctcagctaccataagatgctagggacgttagctgtgaacagactggcaatatggaggaagacgccttagagaggtggtgccaccaagtacttctttcttacaagagaaatggacaatgcaggaagaagccactttggaaggtgaggtgttaggcatgagaacactgcagtgttgcagctgtggcgtctgtctgtgtatcctcggatgacagtgtggggcactcggatgactgacagtgcgggggcggggcactgctgcttcagaccttccctgttggaacacagcgctactcagcgcagctgcggcatcaggtgatgctgctcccttcagcgtgggcttttcaaaatgcccagggtctggccagaccctgagagaatattcactgattctttgataaatcttagtaacaggtctattttaatctgtgaatttcaggatctatcacactcatcaatgttatcaagaaagtgtaaaaaaaaaaaaaggcaggggaatagaaagcaacagtacttcagaggcagcatcagctgtctgtctgccgaagcatatatgaatccaggagacctaagtcgaagctgtcttgtctgctttgccagttcctagcaattttagtgaggagaagtcaacatgaacgatttaagtccatgttctttctcatggttctggggattgaccccagaggctctgtgtgccaggcgtgttctctcccactgtgttccattcctcgcctctcacagtgtaccacccaccttgccttcttgaccccttctgacactggtctaattgagtcattagtgacaaaatcactgaaaacttacatgagaactggagtaagtggttttggggtcacggggaaatcctggtgtctttgttgtggggtaaccgtgtgggtttcaaggtatttttattctgttgaatagtggattgttcatgatcattgtgttatatgaccctgccttaatgttttcctctttaaatatggaagttgagccatgtagcagtatttagccaatgtgccatgccttcttgaccatgctatagttgtggtctggcaattagaatgatttactcaacggtataacctcttaaatcatcactggggaagcctcaggaaagcaagaatgcagactcactgttcactttgccccacagaaagacgctgctctttactctgctccagtagaacatgttagagtcagatgtaaggggtcagagggaggcagaggaagggggcggcacccccctagagagggtaagttctgactgtacaattttatccttgtcttcagaaataactataaggattactccctggagtccaggctacacttcagaattcaagcagctcttcatctctggaagaaaccttccacggactgatccggaacacacaggatggatcttcccccccggttaacattgactcttgctatggagatcactctctgtgtcaaggtggacccatgatccatcaaataagaaacagaaagcctgctgtcagccacttcctgtcatcggagtggcgtactgtttggtctacatactttcccctctggaatgacatttaatactatacagaaattcttatactctgccttcactgtagatttcaattgagggggtgaagtcttttaaaagactggcaggtacaataaagcctagttagattatttatttttttaatgtaaaaattaatattgttcaaatagcaaatggctttatcagctgagccatttttagattggcttgtcctttaaacttcagagatattttactgctgtttaaatctctgagagtaaataaatatcacatctataatagtatgacagtgggtttctgaagattctggaagagagaaatgaggggcctgaggtgggtgaagtattcctaggcagaagggacttgtatctcagcaagatgtcacagttgtaagtttcaggatttccagtcctctcattggttgaaggtggtggcatttttcagaaactatcctgtatttgaatgtactcatatcagatccaataatagcattcaatcacatagacacatttctcatgtatctaagggaataaaaagctgtattttagatctccctaagcttagtgctgaagcctgaactacagacttccattgtgtttcttacaggaaggagaagctcctgttgctgtgagtgatatgtgacatgtcagtgattgtttacagtcatgatgctgctgacccagggccatggctgcatcttggttctctgagtaggaacccggatcagagcctgagcagatgcccttctggggtccccacacctgtcaatcaccctttgtgaattagaaagaacacgctcatttcgagaaacagaaaaggcacagatggctttaatttctctttgaattgtgtaactgtgagtctctgtgttagacactttcaacaatgcttagcattaatccaaactcttcccattagaatatagtttcttcaacccctcgctctcctcccaatcaacggcctatcaatagtgggtgttacagctgagggccagactccacccagtgacaaaaaccagttagagtccatggacctgggcttttgtcttgtttctattatttccaagaccagtaacttctctagagggtagatggctccaccttccctcgtcagcgccccaggtttgtagttctgagtctttctctgttggttaatagttaacaacataaagcaaataacttaccttttccaggacttgggttttccagtgggagaggcaaggtagcactcactgcctgcagcctccagagctggtgcatttggtagctttctgtatactggggaagctgtacacggaggagtgagtttgataactatggccttgcacatggattacaatacctctagtatccgctgagtctgtggtctcttgtctacagtgagatgaacgtgagcattcatgacctttcagtttatttatttatgcatttagcactgacagtggcccagattatggagttgctcctgctgtccccgactgcagttccccatgctcagcaggcactggtggcctgttacgtaaggtgccatttcttattcaacattgataacacggaggcagaaatcattatatctcactaatatgaatcacacaattagctacagatagtagggaaataaattgtcatgagctatagaaatatgtttaataattatatatatatatatgaagaaaagtttataaattctttagaagagctttgataacgatattttaaaaacaatctattcatactattaatgtgatggggtgtggtggcacacattgttaattctagcatttgggaggcaggggcaggcaaatctctgagttcgaggccagcctggtctgtttattcaaaactcaaaccaaccaaacaaaaagaatacccatattttgtgagaaactatcaaagctcatggtctgtaaattcccattctgatattaaatgaaaaaaattaagctaaaaatgactgttttagagactggagggtgtcccggcagttaagggcactttctgcttttccataggaccagagtttgtttcccagcacccatggcaggcagtccttaactgtctgtaactccagaagagctgacactcgctctggcctctgtaggcacccaaacacacatggcatgcattcacatagaaacatacatacatacacattaagtagacaataaatcattttttaaatgactacttttatactatcaaacaaatctacttgtgctattttattttgtggttttcttttgtttatattgctcaaattctctctgtcagcactgtggaccatctatcagtggctttataagtactgcaatagaattaataccacagaactttatctattttctgtcatgttcaagatactgtaccggcaccaatttcttaggatgtttgtaagaatcatcttttaaaatctgttgtgatttaagatgttttgtgaagagcaagtgcctaagagacaacgttatctaatcatctttttgaggccacgggtaataggctgggtttccagtatgtctgattgcagtttctgtagctacctgcagaggcagtgttctgatcggtgttttgtaaatgtaaggattgtatttcagagccttgggagggaaagcctaatttccttgggagaattgatggaagggtaactacagcaactcccgagtatatttgaccacttgctctgtctgcacataggagatgttccctatttacactgcagacagttgagtggccttctagttgtcctgaggacaggaagagacaagtgggcaggagctaagggagatcaattcagattcctggacactgcagctgttcgagcaatccaacagcccaaccagctccttgggaatggagtgaattcagcagttctggtgactgtcatcccgccctggtctgagtgtctgtctgggttaattgaattggaggtcagctcattctacaatgctttgatcggggtctaaaatctgaggtagggaaaggtaaaaagcaggtaccctctcttcaaatagaagcgcatgttccttgtcaatcattctactgtgatgggcactagtgtcatctgctattgtgtttgttatgggtctggctggctcatctgtcctgtgccatctattctgggtagatccttgttagtagagacccgcaccctggacagtaaaaataatggaaaaagtctttatgatcaagtggaaaactaatcctggaattattctgcttaattctctggacattttgtttttcctcttcctttcttttcctttcctttcctttcctttcctttcctttcctttcctttcctttcctttcctttcctttcctttccttttcttttcttttcccactggtttgccaactttgtattcctgaatcaccagttctggtgcattcagttggaattagttcatgaagtaactgaaattctaagcatttgtgatttatcaggtctagaatggatcttagaaaactacattgtccctttcagcctgtgagcatgttgggcctgctgttctctgtctactgcaatagcaacttgtcagctgtcgctgctctactcttgccgtggccaggggacctccctcttacaccatgttgtgtcatacatctctcagtggtttactttttccatcccgtgtactgggcagatgatagagctccgtggcttgtttgaacattggcctttacccacctctcacccctgtgaacttcttgtgtgccatctcaaagtctttatttttaagattactaggttattttagaaactatcttcgatgtcacagctgttggggttgtagaaatatttgtagatttcatgagtaagacaatttatgaaaaatctagtgacccctttgcaagactttggcattatggaaatgctaacattggttctcgtagctagcccattatactatttaaaggttgttaggcacaatttatttcccttagggagtaacataaaaggtgacttaactaaatttaaatatttcatgccttccagttgcctattgtgaatatcttgagtgtgtgtgcctaagcgatatacataatacaagttttaatctctttaagcatctcttgattagatgcaggggtagctctaatgtatcaatagaccggtatcagtaagtaatataaaataacccatattggataatccttcatgcccttttaggatgaaagcatttctccgagttactttcttcctcagagcccagttgtctacgtactttcctttatgtattagctggccagaaccctgcatctttagttagtatttttttttggcatattgtacatttgctgttagctcttgttattttagaatgctgaacttgaaatataatgtaaagggcacatcagactttatcatcatggaagatagacttcacattgaatggtcctctctgacctggacagcctttcacatggggaacaatttaaatccatcccaatccatttctaaaacctcattgctgcaggaagaagcagcaagaagagctcttctgtgtattgaggtggctgagcaggttcttagccttaaccatgcagaagaaggattcgtggatgcagccccattcccttctaattgcactgtgtacagtgacagagtcagcacagtattgctgcgacaggactttgtgtgcaaagatcaaagcagctgccttactgtgtttaaataataaagaatgtctgcacatgcctacaggttgaattgaattttattttgtggtgctagaaatggaccacggagggctggtgtaggctttggaagtgcgctatacctgagccacatcctcagccccaggttgaatattgaatggaaaaagtcaaggtctgctaatatcaaacttactgacagtaagtgcacaccgcaccttgtatgtcacagcccagtggttcttaggttctgtgtaatttaaaggataaatttaggggacactgggtgcatttaattttattgcacattaactttttttatttaaatatttttaaggactttgaattaaaagtcttcgtagtttgtgtaccaaaagaaaagaaaaagaaattgttttcagtggaacgtaactgataatgagagtatctgaataactgaacatattaaggaatattacttacatttatctaggaaggaattgcattattctgagtttgaagtatactcagattgaaggtgtgactcattctgcttgaggaatcacacacacacacacacacacaaacaccttactttagtcttatcttaatggagcaggagacccaggcaggtcacagttttggagatagtagatgagtataaataattttcacaaattcccatttttcctgaagtaattttttccccacagtagacagttaagtgttttcggtacagctctccccttgcccactcttgtattaaaccaaggttaccagcacgggtgctaagtaagctcgggaccacagagcacttggcccaagggatttatttttaacttgcacaaaagagagagattatggtaaacattttaaatctcaggctcttggttctgttgggtccagattacccaagacctagagagactgcgtgtcactggctcgtgctgtacaggaaaccacttatggttgacagtgggttgtgcaccgtcactgtgtcatggggattccagaagccacgtcttcaccgctttcatcagtttttccttttgttgactgttggcatctgaccacctgggtgaatatcagctgtctctttatagattactattttaaaatatttatttcagatgttcatagaatgttcaattttttgatgcaagttatttacagaggcatatatatttaataattgagatatattattttattgcacaacctattttccaaagcaaatttactttgtaggtgtttgtctttttgtgaagaaaaaaatgtttttttcttttgcctcaaaatacaagttgtaaacctgtcttctggcgtaagtgactcttgtgataatatttgctttccgcttatttgtgaaccagtttggagttgccagttgaaccctcagagctcccctctgacctggattcagtgcagtgctggtcaaacttggcattgtttccctgcctcggtttcctctcctcattgcacttgagtttggcctccgttagttcgtttttcagcaatcagttttacagaggaaaaccgccttaggaattgaagaggttagaactctttgtaaatcgaatgtgttattaacatctgtctgctaataagtggattaaggtctggtcctagagaaagagaccagctagaaagaacaagaaaagtgcaaatatttttgatgtaaatgttgtgttcccgtgacttttcatatgctgattttatgttaatgtgatcacctgtgatatttaagtgaccgcagataaagatttaattttcaacctgaagacggcaggtcctgtttctatttttaatattgagacagttttgaaaacagatgtcgtattataaattgtatttttaagtggaaataaatcaatttgaaagtcagtgttttccttttctttgtcccttacagaaggctctgtgttattagatatatatttaagttgccagattattttcagaattctctattttcatatcgctgtaaccagtttgcctacaatgtgcaattgaattgttatttaataaatgacacgtgatgggattacagtcttctatttgatgtacatgtgaaagctggacacaacattcacctagctggcccttcattgtctcagtgtaggcttggcttcttggtgcggcttccttttttctcctcccaaccatataggccggtatgaaggccctttctaaagccatgctcttggctggtccttgggcgtgaagtgagaagaggggtggatcatttgccccgagggagggttgtgggtctttcatttttgtatatctctttagtagcccagaggattaaactagctgctgacacagccagttgaagcattcactgtagcaaagtggacacagtactggtctttgaagagcagtcaggctgacactcagccctcctagtcagcccaaaaatttagcttgcagcattgcctggattctgtcagaacacgggactgcacgctgaggaagaaaaccataccgcatctcacaggcttccagcaatggttgctcacttccctctgtcctccgtccggtgggtgcagaggggccggtggatgctgcatctccagtaggtttttgtcatagccaaggaaactcaaacctggagcttggatgctttatactggatgccaagcaaccctccccgtgctcctgagagagacattatctttgtcacactggacaggaaatagatttgcgttcagaagggagaagatattttacttttatcttgaaagttgatctgaatctgagcactttaaaaatgacagtctggagcaaaattagtcagtgcctttttcttggagaatagagaaaagccggactataaaaaaaaaccacgtgggagagtctcacagtggcgagcagaagacactgtgttagacggaaccattttaagaacttttactcctgtagcaaggagccatttgttttcagcaagttaagtggaatgagctggcagtggttaggagaggtagtcttgggtgccagattggaattaaccctatggacaagggcagagctagaagattggagcctatggctaaaatctagccaagaagtaatgatttgtccaatcttccccactccccctctttctccctcctggaaaaaaagtaatgacctaccagagtgtggcatctggagtttgggcctgaaaacttgaaaaatgggatgatgtcagccaagatgggagatgtgactctgtaaggactttcggaggagattctgtctatgtaaaagcacagctcttgaagaggtcagctcagaaactttgaaaaattgacccctctcctcctggaagagaaaggtcataaagaacatgggcagccctcccctccagaagggacggggtaattacattcctcagaccacaagaggagggaccaaccaccagctacctgcgagtaggggaggcccagcgcttgtagacacatccacattggccacctacctcattccctaaagaccaatcagtttaaaagtcacactgttctgccaatcacattgtgcctaatggctgctgctttgaaaattgtataaaggctcactggatgggcttcgaggggtgattctctctctccttgtgcagggcgaccctagcatgctagatcaataaagttcctcttgcttttgcacctattcccatctctgagttgttcacttggggttgtctccagtaagttaaggcttgccagagtcttacactctcacctcaaagggaaaagaaatagttttttttctggagccaaatacctgtgaccatggcccaggagcacagatttacgtaccccaaataccatgtgtcaatgaggtagcaattttatgagcttcttactgtaacaaaacagagaaagtcataaatcaaggtacttttcaaatacattgatgaatacatgagctaggcaggttatagaaagatggggagaaccctgtgatacactttaaatgctgtctgacaacacacttggccctttgattactggaaaactaggtggtttttatttttttattttttttattttttagtttttgagttttttgagacagggtttctctgtgtatccctggctgtcctggaactcactctctagaccaggctggcctcgaactcagaaatccacctgcctctgcctcccaagtgctgggattaaagacgtgcaccaccactgcctggcctaggtgggatttttgttggagttgtttgttttatcttttgttgatttgtttttaattcattccaagggttgtgggtttttttgttttttgttttttgttttttgttttggttttggttgttgttgttgtttctgttttgttttaaaatctgtattaagtgctacacagatgtgggcaaagaaggagctaaagatggaccaagatgaattggaccaagatgaattgtaatcaggttttggacttagaacatttcagtttcaagtaacagtgcagttctaatcagttggctggtgagttccaggagtgcttgttcacacatcaagagtcagtttgtaaaaattgaagatcatgcagccgtcgtgagattgtgaaggcaggtgtgtacatgaccctagaatttaggactaagatttggaagcctcgatagcatggcattaaaaaccaggtgacaagtgctcaggcttcctataaagctccaatggcagctgccacgggctcaggagaagttcctcaccaattcctaatgttgaaagaactggaggcaagctggcagggagtgggagatggcacagttagctggggtagagagggtgagaaggtcaagacacaagagaagagaaggaatgttcattgggcctcccagaacagtttatgaaaaatcaaatatagcattaaaacacagcgaggagttaaatatccagaagcaatccctttgtacaactcataacacaagtgaatatggcaatgttcagagtgacagtgaagtggccagtgaactcgagtcatgttagtggcagtggcagccttggtacagcatcagactcatccccaggttgaaagaacacgaggctcccccacccaatggaaggacagagagtatgacagcaacttatcaccaagaggcctcccccacccgatcagcacccttcatcgtccacagtaatatgttttctctgtacatcttacagacctcagatgatgggaagaaagctaccactcaaaggcagtatattctaagatgctgtatacagcactatttttggtcagcctgtcaagcataattactattcacacagttgagcttctgggatcaggaacttatatttaaattggttcccatcgggagccgtggggcacagctaaggcatgtctgaatagacatgtcacaaaattgcctgctgcagacacgtggcctgggtgcctttctgttccttcttaaatagacaggagagctttgggtatatcccttgggactactgttttcttaaggagcactctgtgttggctggtcttacgtcaacttgacaccatctagagttatctgaaaggagggaacctcaattgagaaaatgcctcctccataagattggctgtaaggcgctttcttaattaagttattgatggggcagggggtggttcagactgttgtggttggtgccatctctggactagtggtcctggattctataagaaagcagtttgagcaagccatggtgagcaaggcaggaagcagcacccctccatggcctctgtatcaactcctgcctcacggttgctgccccgtttgagttcctgtcctggcttctttcagagatgactacaacgttgaagtgtaatccctcagagccccattcttccctgctttttgtcacggtacttcatcccagcaataga

SEQ ID NO: 11 - DNA, 361 bp, Mus musculus
  misc_feature 29: n = A,T,C or G
ggtactgggtgcgcaccggataccgcggngccgggggcggggacagctcggtccggtcgctcggggccgcctggttcctcctccacccgtgcatgggctgaacccacagccagaaaagagtcggttctgagttccctgtgggtgtgcggcccgccgcggaggggaacatggcgctcgtggcgcagccgagctggaattggacgcggacgaggtgcgaggaccaggcagagcgggctggtccgggcaccggcgggtaccggcgggcgtgggagggatgcggacccttcgactggcacggagggtgggcagggctgccccttcacgccgaggagcgtcccacggggcccagccgagcacccag

SEQ ID NO: 12 - DNA, 379 bp, Mus musculus
ggagtgtagctgccactgtcactgacaggtcttaaattcacccctgcagtgcgccgggagcctgcctgatgccggtaacttctctgccaggtctggccattgaaagtctctcgagactggggaacgaaacagacgttgaaggtttctgttggttttacattaaggaaggactcctctttttagttggtttcaaacagagctggtacgagagagagccatcctcaaactggaaatcggttctttactctgaagttaccgctgccgtacacacatctccatcggacatggccaacacccccttccaacttgtcccagccaccaaaacccgacctccacactccctgcgcaacatctgcttccggtataaaagtacgtcctc

SEQ ID NO: 13 - DNA, 727 bp, Mus musculus
  misc_feature 510, 570, 676, 710, 714: n = A,T,C or G
gggagtcttcccagtgaacaaggctgtttctgtgcttccgtgtcctcagctttctgcctgtgcttccatctcgctctgaagttaactttatgtccttgagaaccagccttgagtgcctgccctggctggctgatggctgtcgattgactttcccacagttggctttaacaatctccatcggacatggccaccagcggctttcactttgtaccatgcgagaccaaacggacctccagacagcttggagcatctgctatgggaagacctgaaggttcatcagccaaggtggatctcaagagcggcctggaggagtgtgcagaggcactgaacttatttctaagtaacaaatttaaagatgccctagagttgctacgtccatgggccaaggagagcatgtaccacgccttgggctacagcaccattgtggtgttgcaggctgtcatgaccttcgagcagcaggacatccagaatggcatctctgccatgaaggacgctttacaaacctgccanaaatacaggaagaaatgcacagttgtcgagtctttctcaagtctcctttctcgagggtcnctggaacaactgagtgaagaaactgatctccgagcatccctaagaacaagagctggtactgggagggcctaagtgtttccgagacaatcccatgagactgactggncccagtatgacttgcattgccttttccttcctgngaancccatgtgactcc

SEQ ID NO: 14 - DNA, 629 bp, Mus musculus
  misc_feature 611: n = A,T,C or G
gatttgcccacggcactgaattccctgcttatccagatctctcatcttcaccactaggctaaatcaagttcatcagccaaggtggatctcaagagcggcctggaggagtgtgcagaggcactgaacttatttctaagtaacaaatttaaagatgccctagagttgctacgtccatgggccaaggagagcatgtaccacgccttgggctacagcaccattgtggtgttgcaggctgtcatgaccttcgagcagcaggacatccagaatggcatctctgccatgaaggacgctttacaaacctgccaaaaatacaggaagaaatgcacagttgtcgagtctttctcaagtctcctttctcgagggtccctggaacaactgagtgaagaggagatgcatgctgagatctgttacgccgagtgtctcctacagaaagcagcactcacatttgtgcaggatgaaaatatgatcaacttcatcaaaggtggactcaaaattagaacaagttaccaaatatataaagagtgcctttccatcctgcacgtcattcagaagaacaaacaagagcagcacttcttctatgagtttgagggaggagtcaagcttggaacggnggcctttaatttgatgct

SEQ ID NO: 15 - DNA, 142000 bp, Homo sapiens
ccctgatatgtaaaaaattcaacaacaaaaacaccaatcaagcttcaattataagtatagatttttgaaaaattgtactcgattttcattataacataattctgtcactaattagagcgaagtttgtttggatctcttcaaaatttgaagagttgaaattccaaaggcagaataacagcatatgggagaagaagctaccagtgagatggcttcatgtcaaaaggatgtgctatcaattcaggaaccaatgaactttgaaaaacagaaccatgcatgagtaatacagagtagaatctggacctggataggaattctagcctcagaaagtgaaacataggaggaggtaggagtgggttgggggtctgggaaggaatggaaactttcaagggtattggaattaaacaaactctatgtctcttctggtccatctgattctaagtgttcagagcatgtgttctaaataataaaagtattattattattattatttttgagacggagtttcactcttttcaccaggctggagtgcaatggcacgatctcggctcacggcaacctccgccttcagggttcaagcaattctcctgcttcagtctcctcagtagctgggattacaggcgcataccaccatgcccagctgctttttgtatttttagtagagactgggtttcaccatgttggtaaggctggtctcgaacttctgacctcgtgatccgctcgcctcggtctcccaaagtgttgggattacaggcatgagccactgcacctggagcttttttattgagtacctgcactgatgaataagatagtgcctccttctaagcaatttacagattagtgggaacccaggaggcggaggttgcagtgagccaagatcgagccattgcactccagcctgggagatgagagtgaaactgtctctcaaaaaaaaaaagtattattatttagaaattgggtcttgctatgttgctcaggctagtctcgaactcctaaactcaagttagcctccttcctcagtctcccagtgctgtaatcccatacaggcgtgagccaccacacctagcctgtgtcagctagtttttttaaaacagctttactaagatataatttacataatcataagttccacctattgtaagtacacaattcaaggatttttagacaattcagagagttgagcaaccatcacacgatctaacccattttttcaatgtttctgctgtagaaaccattttattattctagtacaaaagtacatgccaagccattaaaattgtacagcaagtattaaggatgcaaagtgactcactgaaaatgtatgtaatggacttgcacagacaactgctctactgacacagaaagaaagagagggagggtggctagagccagtacagtacaaagcaatggttatcagctaggccctagagttagactgctggggttcagatgctggcatccctacttacttaactgctgtctggcctcaggcatattacttgaactctctgagcctcagtttactcatctgaaagagaacagcaccctactttatggggttatgaagaataaatgaaatactatatgcaagaggttcagtagagtcctggcacatagtaaggactcaagaactattagctgtttttacagttatcactggatgactattaaatagcctttcatgagccagacatggaagaccacatgctctaattaaatttatatgaaattctagagaaggcaaatcgatgttgatagcagatcagtgattgacagaggctagggagcggaggtaggaaattgacagcaaagggtcacagaaaacttttcaggatgttctatattatgactgggatgctttgtaaacacttgtcactgaatcacacatttaacttggtgcatttttctgtatgtaaagtaaatctgacctctctcccccaaactcttaaagatctagcttttaattttccagttattttacatgtcagaagcaaggttcagtttctaaactcagccaacaaatatctgttgagcacctacgatgtgcaagacactgttctgggtgttggggatacagtcttgaagaggacagatagcatcctacccccatggagtttatagttcaagcacgaattatacacctatgtttggagttacaaaatacaggatgctatggggagaatacactgtccgggtagggggaagtagaggagttccaatatgtataaatctctgtcccgcgtttttttctattttttgaacacagaagcaagcagagtccttccacctacagtccaggtgggtggtgtgtcagaggcctctcggggaccagtgaccgtgacccaaggctgccctcaggccacaccatctgcgagatgcggtggccacctggcgagggaaaaggactggcaccggaccaaagaccaggtggatgcttccacggaccccaggtggggcgctgctttgaccttggcttcgtcatgcccgcgctctctagcttctttccaggtgtgcccagccaccgcagagaacaggcggcaggaaagcttaggaaaccctcccagagggcgtgccagaccgggaaactttatctgggaggtgactccacccacttgggcggggctgccgcccgctgggggccgggcaagtggcccggccagcggcgcggcgtccggggaggaaatggatgctgtgctggcctgccggctccgggggcggggaaatcgagtagctgcactcaggccccgcccgagacccggagggagcgccgggccgtccccttttgccctcctttgcgctgggctgagcccagagccgagagcaggagtcggctctgagttccctgcttggtttttgggtggcagcagccagaggaggaatatggcgctcttaggcagccgagcggagctggaagcggacgaggtacgatccgatggggattgcgggcccggcccctgaagccctggacaggagtccgggagagaagagtgagcccggctaggacggccgaggccccgcccccttggtcccctctctggggtgggctggcgggcgccgggtgggggcgcccggccttggtaggtctgtccccgctggagctaggagggtccctgcggcgcgcggagcggacgcagtgccgaggttcggagcgccggccccgcgagtcgtggggatggaggacccacgtcctgccagcacttggatgggcgtgagggcgcgggaccataggacccgcagctctgagctgttccgggccggcccagcgacgcctgggctttacgaagtctgaccctgaagtcctggcactggctctctgggtgttcgtggaatcatccctcgacctgggaatctcaccttctatggaagtttcctggtggcagaaccgaaaggcttacgattgatgaaaagagggggcagcctgaggaacaatgagtagaggggtacctgccgcgacagcagggcagggctgccaggggctggggctggagggctagagccgcagcccaggctgtggtgcttccctctccctccacggggccgggacacttcccctagcaggtcctcagagtcggtggtggccggagggaaaccactttgagaaccgactccggcctcctttggtttcaactgtgtttgagtaattagccactccttcagtcgtggcgcgcccgggcctgagcacccaggggctagcgcgccggacctgttgatttattgactattcatttcagcacctggcaactccagagacagcgctctccctgctcttgaagttgagaccgaggctccagcagcagccagcacccacagctgctgttcctgccatcttacctgacttgaattgtgcgagtcgctgcctttagaaggctttggtttcaaatgatgcaatagtggacgatctggaggaggcggttaagtttcccgtccatctctttagtgccaggaatctcctgacaaggaagactatactttaaatgtgctccgtaaaataaacaaaaaacaaaaactgaactacagctcctctgcatgacagagagacaagagggcaagccgggctgtccagacccttgcttacagcctgtcccttgcattgaggatcccaagactgtagaatgaaatatttgaatcccgatctgtttgtaggagatttgctgtgcttagaactatgtaattctctagattagggcattgttgaggcggtgctattattaattaacactgggataataggtgtaaactgggactgtttcggagatactttgacaaatggtcaccccagctatgctcactgcctactagatgaacggttgagatgcattagccgatgaggagggaagttaggtttctgtgggtgaaactctgggtggaagttaggtttcagagtagcagagagcctggcacacagatacttggtaaataaatatttgttgaatgaatgaaagactgcagaaaagatgttgcttaataacaactcagtttttgccatatcattcatttatttttcttcattcattaactattaggcttctgttacatgctaggtactgtactagtcctagttgatgagcaaaatacaaattgaattctttgttcatgccaaatttacttttgtccctcacagtttaccacttccattgctataaactgagcaagcgtttattgagcatttactttgggctcaaacttggtaggtgccttagagaaggcatagttttgcctctttatggttctcagtctgattagggagatatgacctgggtacaagaactctaaaaaggagctcaagtaaatgtaagcaagtaagaagtagtgtgttgtagactggatacccttgatttatttgtagaaagtcccttaccgtaaatgggcttgaagaactctaacctcgagttcataagaccctgctcttcaattttactgggtgcgcaaatagcttatttcagctaggaagcttttcacgtatttaagaagagtctgatagtctttatttgatattgatagtttttaatggccattatttgatattctgggggagttaaaagggacaaagtgatatagttggaaaagtaccaggttaggtttttaggtaacctggttcttctctttgttcatcacttatgtgtgtaaacagctgactaggtgccaagccctgtactagcctggaggtacaacagtgaacaagacagacaaggtccttcccatgactgttgaccttgattgagcaagtctgtcaacctcagagggctctttcagttcccttatctgaagaaggaggggctggattagccctaagtgttcttccagctctaaagatctgggtttttattgagatgggggagaggggtcgggggggaggttggggaagagggagtttcttttgggagaagggctaataatatggaaatctttttctttaaaagtacccaaggaatgaatgataatggtagagaagctcccatggtagctgtgggatggaggttttcttggctaaattgattttttaatttgtgttttttaggtgctagtatgataaattcgggagcatagaagttaggacttgcatcctcattggaggcaaaaattggttattggggagcacaagcatcttagatattataatggtgtgtggccatttaaagctcaatcaacaaaagcttgtttcttaatatttgaatttctctcattgggttttcttgtgtattacactagcaacattgataatggattcatggaagatgtacagaatatattcaaggtcaatccaacaaatttataacgtagagatggctgtggttggaagactttctctctagttgcctgatcttgaagtcattttagttggttaccttcacatacttatgggctaccattgggtgccttgtggcttgcttatatttggccctcaaatataaggatttgagaattgaatgaaaatcatttatattttattatttaattcaattaagattattcagctcaccaataattatctcaagtgccaaaaaggaaaacattgacagtatttgaattaatatctagcagctaattaagttaaaaattttctcatatgaggccaggtgtggtggctcatgcctgtaatcccatcactttgggaggctgaggcgggtggatcacctgaggtcaggagttcgagaccagcctgaccaacatggtgacacccagtctctactaaaaataacaaaaaaattagctgggcgtggtggcgggcacctgtaatctcagctacttgggaggctgaggcaggagaatcgcttgaacctgggaggcagaggttgcatgagctgagatcgcaccattgtactccagcgggggcaacaagagtaaaactccatctcagaaaaaaaaaaaaaatttttctcatatgaaacaaaagttcactaaaaatcacttttcaacctgcgtaacgcagtgagaccctgtctctacaaaaataaaaatatgaatagttagctgggcatggtggtgcccgcctgtagtcctaagttattctggaggctgaggtgggaggatcacttgagcctaggaggttgaggctgcagtgaactctgatcatgccactgcactccagcctgggtgacagaccccgtttcaaaaaaaaaaaaaaaatcacttttcagaaaatgattttttcaatagttttacttttgctggaaaataacagttttgaatgttttttgaaaagttgattacattgctattatgtaggtatagaaattgataatttgtatatataatttgatgcattatatttaacattatattaaaagtcactcagcaaatacagttataaagttaaatgttcatagattttttttttgagttggagtctccctctgttgcccaggctggagtgcagtggcacaatctcggctcactgcaacctctgcctcctgggttcaagcgattctgctgcttcagcctcccaagtagctgggactacatgtgcgtgccaccacgtccagctaatttttgtatttttagtagagacggggtttcaccatgttggccaggatggtctcgatctcttgacctcgtgatccggccgcctcagcctcccaaagtgctgggattacaggcatgagccactgcgcccggccaaatgttcatagctttttaaacatttttttctttttttggtgggggatggagttttgctcttgtcatccaggctggagtgcaatggcatgatctcggctcactgcaacctccgcctcccgggttcaagcgattctcctgcctcagcctcccgagtagcttggattacaggcgcccaacaccatgcccagctaatttttgtatttttagtagaaacagagtttcagcacgttggccaggccggtctcgaactcctgacctcaggtgatccacctacctcggcctctcaaagtgctgggattacaggtgtgagccactgcaccggcttttttttttttttttttttttttgagacggaatctcgctttgtcacccagattggagtgcagtggcgtgatgcatgtgccaccacacccggctaatttttttgtatttttagtagagacgaggtttcaccatattggccaggctggtctcgaactcctgaccttgtgatccacccacctcgacctcccaaagtgctgggattacaggcgtgagccaccgcgcccggccttttttttaaagacagagtcttgcttggtcacccaagctggagtgcagtggcatgatcttggctcactgtaacgtctgcctcccgggctcaagtgattctcctgcctcagcctccggagaagctggaattgcaggcgcccaccaccacatccagctaatttttgtatttttttcagtagagatggggtttcaccatgttggccaggctggtctcaaactcctgaccccaagtgatccacccgccttggcctcccaatgtgctgggattacaggcgtgagccaccgtgcccaaccttacacttaacttttaaaatatttattgagtcattctgatcctgttattgaattaaaaaagtaagctttatacttaggctcctttgagggttgataatgaaaaaaattaagacactgactaggaaataaatggcttatgtgacatgtttttaccgcctgctttttggcccaggaatttttagatctaattctgatttggctaatttctctttggaagtttagatgaagttttgataaaattcattaccacaattttctttcttttcttcttctttttttttttttgagatggactctctctctgttgcccaggctggagtgcagtggcacgatctcagctcacggcaacctctgcctcccgggttcaagtgattctcctgcctcagtctcccgagtagctggggttacaggcatgcaccaccacgaccatccaattttttgtatttttaatagagacggggtttctccatgttggtcaggctggtctcaaactcctgactaaaggtgattcgcccacctgggctttccaaagtgctgggattataggcgtgagccactgctcccagctgagatttattctttcattccaccaacgttcattgaacgcctggcaggtcctaacagtctttaaatgctggatgtacacactaaaacaagacagttattacccttgaggagcacaacgtcaagcaaaacacttaacacaagtcactgtactatttctatctttgggttagggtaggttttaggtaggaaggtcatataatttatcattcaaagcagggcactctgagtaaatgagcgctttcagtaattgcactaagacaacaggtacaaacagggatgattggcttcccttgtttagggtccggcaaagacttgaaaggagagatggtatttgaactaggtttcaaagggcaagtgggattgtgttgggctccccagtgggaaggccttgggggaagttgagatgggcgggaataagagagcacttggtacagtgggaaggagagtgtcaagggcagaaaccaaaaaggctgacttgggtcgtgagtcattgtgtcctgaatgtcacgctaaggaatttgggttgtatctcctaaaaaatgggaacctggaaggtttttttttttttttttttttttttttgagacggagttttactctttcacccaggctggagtgaagtagtgggatctcggctcactgcaacctctgcccccacagcctgggttcaaccgattctcctgcctcagcgttccgagtagctgggattacaggtgcctgctaccacgcccagctaatttttgtatttttagtagagacggggtttcgccatgttggccaggctgctttcgaactcctgacctcaggtgatccacctgccttggcctcccaaagtgctgggattacaggcgtgagccactgcaaccagccacatggaaggtttttgatgaggcaattgttgtaagattgctgattttaggaagataaatctggtgaagtggatgaagccaggatgtggaggtggcagaaggaggacaaaaggctgttgcaacagttagtgtggaagatgatgagtaatgaagtagagtagaggctgtggcattggacagaagaggccagagttaaaggatttctcagaacgtgaaagaggacttgacttggtggcctgtcccccagtttgagggtcagtggtgcagtgagggaggagccattgagtaataattctgggttccttgtgtggctgggtaggggtgctgtcccctaaggagaaggagtagagtttattcctgtttcctttcagctgggtaggagatggggaaggacagcaagcagatgaaactaacccctatgcctcactgaattttctgattgcggagcatgggccatttgttcatgagggtatgcatttgggcagaattaagaaagggtgtttgtaaattggtaatgcaagttagtggagggaagcagcatcactttaccgtcagtcccaactccagctcaggttaacaaacagacattctcctgaaatgtttcctgaaatgttcaatcttgagtctcttgaaaccctgttttttgacagctgtttttctagtgaaacttttcctccccctgtacctggatacccacttccttcccttcaagtctgggtaacacatatgcttctgcagacaagtatcagttcttcctgtgctagctgcttgccttcttatctcagtttcctgcccatgggtgctgttaccagtcatttagtgtgaatctgatactgtgagttcagtgaagctcagagtttccatctagccatctgttgacagccgaccaatctccagtcttggatgccccagtagcatctcaggcggagtctcctgaagttactttgtattcacttcccaaagatgagtacctggggactcctgtgggtgcttttgaggcttcctgggggagagattttccttttttgagcctcccattggccaccaccttagtcagcactctccttttctccccctgtgcttcgtggatctgtgctgcctcctgatgcaccaagtccgtttatacccagagccaccgcggccagttgctgtattggtgatgtcatcacacctctctaaagggacttctgaagtggggagtgcctggcagttcctaatgccatcatgcatcttcagctctttatttaaagactaggtgtgtagtaaatgctttttgttgtgatctgtggatgtgtccccttggtactgctgatattatgctgtcatatacatagggcctacgtattttaaaatattttggtgaaatgatacattgtatgtttgttggatctgaaggtaactagtgagtgacaattttcagtctgacttaatgtgttgagtattgtgttaggtgctggacaagcaaatgcagctcctgcctcaggttatggtctagtggagagtggggacatgtgtgttctgagaaccacctggtggaggagggatgccagggtactttgtgagcacagaggagggcacctctcctgggagagagggtagtcaggaatgatttcctggaggaggccatttcttagacattctgagtcaagaagaatgagtaggggttagccatggagaagtgatgtggggaagggggagctcttgaagtgtcttccaggagagggaatagcgggataaggtgcagaggtgaggaagatcctgtggtgctctggacaggtggagtgtcaggaatcaaggctggaagggtactttgttagttctccagagaaatgggacataatatatagatagatgagaggggatttattatgggagttgtctcacatgattattgatatggtttggctgtgttcccacccacatctcatcttgagtcatagctcacataatccccacgtgtcatgggtgggacccagtaggaggtaattgaatcatgggggtgggttttcccatgctcttcttgtgacagtgaataagtctcatgggatctgatgttttcataaagggcagtttccccgcacacactctcttgcctgctgccatgtaagatgtgcctttgctcctccttcatctttcaccatgattttgaggctttcccagccgtgtggaaatgtgagtccattaaacctctttttctttataaattatgcagtcttgggtatttcttcacagcagtatgaaaatggactaatacaattatggagcgtgagaagccctaccatatgctgtctgcaagctggagagctgcagaggctggtagcgtggctcagtccaagcacagaggcctcaaaaccatggaagctgatggtataactcagtctgaggatgaaggcttcagaacctgggggactacaggtgcaagttctggagaccgaatgctggagaaccttgagttctgatgtccaagagaaggagaaaaaggacttcccagctccagaagagggaaaaagcaaatttggctttcctctgtcttcttgttctatctgggtcctctgctgagtggatggtacccaaaactttgggtgagggtaggtcttccttaccctgttcatggattcaaatgccagtctcttctggaaacactctcccagacatacccataaataaaatctttacctgttctctctatctgggtatcccttaatccagtcaacttgacacctaaaattaaccatcacaggtaagaagggccgttcagagactttcatgtcagattgtggagatcatggtgtgcatctgcgggtttcagtgaggagtggtggggagcaagcagtattttaggtggctccctggcaaggcgtggaggctgattggaggtagacaagcccagagtgacggaggctggtgttttgttttgtttgttgaatgattattgggactcactgacgacccaagggtacctaataattaaggcaacatgatgggtaagatatggtgtggatccctctgaaaaaggcagttagaaatatggacacagacagctgtaacctggagtgcagggtagagtctagagagggttcaagtgtcctgtgctccaaggagaagagggctgtcacagggtggtccacctggacattctctctcctgcctgctgcccaccccacctgctgacttgtttccagaccaagtctttactgactagctgtgtgacttagagcaagtcccttaatgtttttgagccttgttttcctcataggcgacacgaaggagttgaaactgatgatctgtctgtaaaagttcctttgagtttttgacatgtgtcttctagaaggtgacattcgacctgggcttcatgaggtggaatttcagcaggcagcaagggaggagatcacccctcattccttcaggcagagggaacagcaggggaactgcgctcctcaggcgtggtgaagtaggctggaggccatgtggttggagcacagtatatgccccctttaagtgattaatgcaggagagctgctgtgagtgtgttccagccagattgatcagaatctggccttgaatgcttagctaccgagtttggcttttcttttttcttttcttttcttttttcttaaagagacagggtcttgctctgtcacacaggctagattagagtggtgtgatcatggcttactgcagacttgaccccctgggctcaagggatcctcttggctcgcatgatcccccagccttggcctctcaaagtgctgagactacaggcataagccaccatgcctggccctgccttttaaaaaaatttgcttttggccaggcgcagtggctcatgtctgtaatcccagcactttgggaggccgaggcaggggggtatcacctgagatcaggaatttgagaccagcctggccaccatggtgaaacccagtctctattaaaaatacaaaaatttgctgggcatggtggcatatgcctgtaatcccagctactcgggaggctgaggcaggagaattgcttgaacctgggaggcggagattgcagtgagccgagattgagctattgagctccagcctaggcaaaaagagtgaaattccttctcaaaaaaaaaattgctttttttgacagtggagacacacatgcacccttctgtatttggggaatatttttgcttttcttcttcttttggggtaaaggaagcaacaataatgatttccatttgtttggtttcactttccctttcccaaccccatttctaaggtacagttttaaacggatgcctgtaaactgaaatgcagtgggtggttaaggagacagacaaggtcagaggcacttgggtaatttcacaggtttatatttcatcacatagacttttaccttcggactaagttctgagatagaaaaccaacttgagccacggtgctcgtgtgggcagcaggaccagtcacagcttctttgaggaaatgcttggtcctccttttttccctccctgttttctcagaccactttgtcctggcattctggacaaccatgagtcacagtccttacactcagaaccaaaggaaacaaacctcagagtctcacattgtttttcagaccaaatggagtattatctttttgagaggaggtagacaagacagatgaggacagagagggagagtcctcaagagggggaagtgaggcctgactccaaaatcctcccccaaaagtactcatatgtcaccccctgtgcagaatcatcaatcaagggctcattgacccataccaggtcctccatgtgcagagcagcactgagtttctgagagagtggccagctgggcttagattctggcttcccatttcctctctgactttgaacatgtgatttcacttctgacattcttcatttatgaaggatgaagtcagattatattttataaagcacctgacacatagaaggtactactaaaatgcaaatttactttctctttatgcttttaaagtcttgctgctactggttcattatctatggatttaatgaagaatctgcagctaacatttcagtatgttgaaatatatttttaccttatttttgcagtcaattgaaaagagaattctacagaagaagcagaagggaagtgattggcccgaggtcactcagctggcttaggcacagaatcagggttagaagctagattccctaactctaaaccctttgccctttacactaggtcaagcagccacaaacttctcaaacttgactaagaggttaaatgcagcctgcccacctcctgcctatttttgtaaataaagtttaattggagcacagccatacccatttgtttaggtgttgcctatggctacttttgccctactgtggtacagttgggaaacagatgtgtggctcacacagcctaaatatttatatgccttttatggaggaagtttgctgaccctggtactaggtggtcagcaaacttctgaccttctggggtgtttaagtttgtttgtaatgtattgtaagccttatgaattaaatgtgcttgtttccttcatgtgcatgtaagcatcaaaaaataggaaaaatagaaaattacttgacacatcccattaattggtttggttgtaagttctggagtcagttggacgtgggcttgaatccctgctcctccatgtataacctgggataagttaactcaatctatctattccatattcaccagagaaatggcgataatagaacctgttgtgagggttcagggaggcctatgcagcgcttatcgtggggggcccagaagttggcttgtggcattgtcaaggctgcactctgtggctgctcacaggcattgtgtaaagattggcccagccagagtcttgcagaaaaaccttcctctgtgatggagtcctgtaggataaataagtcacctctcaggctaatacccaggactccagctgggaaattcttcaagtttacatcctcccacctttcctttcctttcctgagtgggaggggaaaccacttcacacaaaagagagcagtaaacaggggctcaaagggccatctgttccagctctatctaaaactgaaaagtgttaatatttgtcagcaagggaggtgataatgccagcaatattttggaaacagcatttggtcgctgacacataaatggtgttgtaacctttgttttctccaaacattttggtcaatgtcataaagttcttacagggttttcaggtagcacctagatgttggtaggagactatggcctgtaaaaggtatgtttgtgttcagttactgaacgtaagaggctaaaaggtaaaggaagtaagagtgtgcaagcattcctgagccctggagggactctagggttcttgctgtgccctaaagcagtgtactgcgctagactgctttttttttttccagctgctagcagctgacaatagactgctctttctaaaatgcaagtccattttcgccttgcctcttaaaatctgtgcacagcttctcattgcctttaaagtaacatgcaaataccttagcatgacatatgataaaaacttcagcagaattaaatttaaaggagttcaattgagcaatgaaagattcgtgaatcagtcgatctctggagccagagcaggctcggagactgcagtgcagccatgtggtggaagaagatttatggacagagaaaggaaagtgacgtgcagaaaacggaagtgaggtacagagacagctggattggttacagcccacagtttgctttatttgaacacggttccaaccgttggctacatttgatggaccaaaactcggtgattggcacaagtgtaggtaaggtctgtttacacctccacttgtagctcacgatgtacagagaaacctttaggccaaacttaaaatatgtaaggaggcagctttaggctaaacttgatttaacacatgtaaggcctttcttagcatcttcctaagtggttctcatattttagtgtgcatagaaatcacctggctggggtacaggtggcctgttacaatgcacatccctgtgtctcaccgccagcgattcttgctcagtaggtcctaggatcttgcattcctaacatggacttttaacatcagccattctgatgtgcttgtggtttcttttctcatgcccaatttcctaaaaggtggtcatttcttcccaactttttcatacactgttcccccacctggacaattcttttgaatcatttcagacctccctcaggtaccagcccacctccaggtgctcagcaactagttatatgtcattacatgagtatatgctctctgagaaatgtgttatgaggcaatgtcatcattgtgccagcatcatagtgcacttacacaatcctagatggtacagcctactacacacctaggctctctggcatggcctattgctcccaggttacaagcctgtacaacatgttactgtactgaatactgtaggccattataacacaatggtatttgtgtatctaaacatagaaaaggcacagtaaaatgtggtatacaatataaaaaacagtacacctgtatagggcacttaccatgaatggagcttgcaggactggaagttgctctgggtgagtcagtgagtgagtggtgagtgaatgtgaaggcctaggacattattacacattagtatagactttatgaacactgtacacttaagctgcaccacatttatgttttttctttaataataaacctttgattaatggaacttttttgctttatgaacttttaaattctttaaaactttttggcacttttacaataacacttagcttaaaacacaaacacactgtacagctatacaaaatattttctttatatccttattcaagcttttttctattttaaaagttttttactcttacttgtaaactttttttaagaactaagacataaacacacagattagcctgggcctacatagggtaaggatcaccaatgtcacagtcttcaggggcagtaacatggctggagctgtcatctcctatgacaacaatgccgtcttctgaaatacctcctgaaggacctgcctgaggctgttttagagttaactcttctttttttaataggtagaaggagaagggtaccctctaaaatcacgattaatagtacagtataataaatacataaaccagtaacagttgtttttattgttctgtactatacataattgtatgtgctatacttttatataactgttggtgcagtaggtttgtttataccggcatcaccacaaatatgtaggtaactcattgcactgtgtgttataatggctgtgactaggcgacaggaactttttagctccactccaatcttatgggaccaccgtggtgtatgtggtccatcattgacctgttgtagttacacggcttttgtctgtatttagcattcctggctgccttgagaagaactattccttctttggcatacatgctgtggcatccaacaggaatgggatgtgggcattaactatgattctttcctgtctgtaaaattctagccttatgaatgtacttacaaaaagtaaactttacacatatttgctaattaagttaatggccacgaataaggatttaaagggtgccaggcactgaggcaccaggctgcactcagcaactgtgaagcaggcattagaattcccatttgattgatcaggagactgaagctcacagagaggttaagttacttgatcaaaggcacattggcagcaagtggcagaactccactgtgtctgctgccttgcaagcttgcccatgttctttcctctttcccgcatgccttgctaggaacagataccacaaatctgaaattcaggtgtgtcagggaagaggctgatttttttttttaattctttgtcctacttgagactttggatccagtgacggtcccttttgttcaactggtaatggcttaaaagtgcaactgtttgtgcatccttctagcaggaacttaaacatgttggataaatagcagctgtcttaaggaatgaatagaaaatcaggaaaagtcatcatccatatgaactctacatatcatctgctttcttgcaaattgtattaatccgttctcatgctgctgataaagacatacctgagactgggcaatttatgaaagaaagaggtttaatggacttacagttcactgtggctggggaggcctcaccatcatcgcagatggcaaggaggagcaagtcacgtctcacgtgcatggcagcaggcaaagagagagcttgtacagggaaacttccatttttaaaaccatcagatctcatgagacttattcaccatcacgagaatagcacagaaaagacttgccctggtgattcaattccctcccactgggtccctcccacagcgcatgggagttgtgggagatacaattcaagatgagatttgggtggggacacagccaaaccatatcacaaatggaacaaattattcatgtggacaatgtgtttccacaagagagggtggcccttcttcaccatagaaagcagcaaaggaattcctttaatgctgtctaacaatgtgagagttttatcctctcaggagggagactttacctcggtaatccattagcattatctcaatacacttaaacacgcccagctttattaaggtgtgctttgcattactccttttacgtataacccaaaaaatgtctgagacagatctcaatttagaggtttattttgccaagatagaggatacgcctgggaaggagacacagttgcagtaggatctgtgccctgtgcattttccaaagacgattttgaggagttcaacatttaaaggggagagtggcagaaggggaaagcaggaaagaaaaaaaagaggtagatatgcagtgaggtaaggggtcacattcttgtgaggctttgattagcgttcactggatccacatgttacatgtgaaaggagggagtagaggaacagtcagttatgcattctgcattttaaatctgcattttacgtaaaacaaagtaaacatagagtagaggaagacgtcaaacgtgcatttgtctctgggtggatggtaggatgacttctagtcttgtctttgtcccatacctgtgaagataagttgttaagttatattttcagggtgagattgaacagaactctgttttatggtaaagattctggggcccacaaggcatttccttgtgagcaatttgtgaaggagaccacctggggagataggtggccttctatcattgcagctatctgtttaggaacagaagggaggaagtttttgtgtgactcagttcccaagcttaaattttctctttggcatgatgagtttaggtcccgagattttattttcctttaatgtaagtgttcaagtcagtggatttttagtaaatttacagagttgcatagccatcaccacaatccaatttaagaacatttctatcatcctataaggatttctctaaccatttttttctcactttagtacacttgtaatacttaaaataattaaaaaattaaaaatcaccaggagaaagtaaagtttcccagacagaaataaaaatgagcagtcattatatatgattaggataaagcacaagtgttaggtgtcacaaatcaagaccgggagagcacgggtgcttttgggtcagtgtttggctttggctctcacactggacatcatcaggggggtcaagggctgtatgaattactcctgcccacatgaataatttgttccacttgcaagaaagcagatgatatgtagttcatatggatgatgacttttcctgattttctattcattccttaaggcagctgctatttgtccaacatgtttaggttcctgctggaagtatgcaaaacagttgcatttctaagccattacgagtgaacaaaaggaaatatcactggatccaaagtctcaagtaggacaaagaataaaaaaaaatcagcctctttcccggcatacctgaatttcagatttgtggtatctgttcctagcaagacatgtgcgagagaggaaagaatataggtaggcttgcgaggtagcagacacatggagttctgccatttgccggcattgtgcctttgagcaagtaacttaacctctctgtgagcttcagtctcctgaccaagcaaatggggattctaatgtctgcctcatagtggctgtgtgcagctctggtgcctcagtgcctggcatactttaaatacttatttgcatccattaatttaattagcatttgtgtataaagtttactttttgtaagtacattcatatgactagagttttacagagcaggaaagaatcataataagattatttaaaatactgcaactagccatattgaacattttggtattaaatattcatttactgatagtcattttatttttgggaggaaaggttttgtttttattttaaaataccaacactggtaaatgtccttttggaggactggctgaagccaggtaaccaagggcaaggcactttgagccacagtttcctcacttatacagtggggctaaatgatataatgtatgcaacttgctacctggggtagataaggaacattcacaaaaataaggataattatactttaaaagcgtgtaattaagtgctcctagaggtctggggtgttcacatttctaacaacttgcttatttagtaataatagcctatgagagttccctgactcccctcatgggatgtgtgactgggtgtggcttgtctgttcggctgccatgcatgctcaaaccccttatgggtgggggagcacaaagatgggcaggtgcagaagctggggcaagtgcccctgggctccggcctcacggcagcatccaggggtgggtgtctgtgactcccaaagcccaagtggcatgtgttgtgttacagtgcgctcttttaaccttgccatccgtggatggcttaagtgttaaccagcatagtgtcctcttggtacccaggcccttgtccagtgtccaggaagaatcaggttgcacatggacttgaaggatgaatgtgggggctttattgaatggtggaggtggctctcagtgggatgaatggggagctggaagggggatggagtgggaagatgatcttcccctggagtgtggttgtccagcagccaatctcctctccaaccatccccagctgaactcctctcgacgacattcagatactccttctcttctctttgctgtgccattctgccattcttctgctcttctgttcatttccttgtggagccggggttttggcgtttatatgggtacaggataggggatgtggtgggccgaaagataacttttgggtgcaaaaccaggaatgcccattctcatttagggctgcgggtttccaggcctgagaatggggcctttgctggggaactgctctcttctatccagtatttccctgtctcctgtccatatcatatggatgtattggtatttctcacaactttgatagaaaacattgagattcttggtatgctttttcatctggcaatctatcaaaatgtagtttgatttcacaaatggtagaaatgactttattaaggtgtcgggttccataagcttaattgtatagctaattatatttgaaatttacaaaggaaaggtactagcttagaaagaatcatttttttatgttttttttttttttttttttttttgagatggagtctcgccctgtcgcccaggctggagtgcagtggcgccatatcggctcactgcaagctccgcctcctgggttcacgccattctcctgcctcagcttcccgagtagctgggactacaggcccatgccaccatgcccggctaatttttgtattttttagtagagaaggggtttcaccgtgttagccaagatggtctcaatctcctgaccttgtgagccactgcgcccagccagaaagaatcatttttttttccctaaaggttttcttgtctttacctccctttacagtttatggcagaggagcttacattttaacttaaatgaaggtgcccctgtttgatatatgcaagtccagtccaagagggtacttcaggtctgtaagctccgggaagcgagtaccacatggcaatagattaggctctgacattttaagacagagggacatgtgacatgcctaatgaactcttatctctttgttaaagaccacaaagcattccatttcaactgtggcaattggagacaatcatctcttccgtaactctgttacgactgacctgttctgttgtctctagctgtttctcagctttcttaattttggcagttctttattttcagattgaccattcagctttgtcagatgtcactatagatttctctccctctctcttaatgagaaatgattttaagagatagtgttttagccatgtacgctattattgtcatacaaatactgatggccctttgggctcccctccaagcatttagagcaaagagtaaacagatcaattaagatttagtaatgaaactcagctttagagaatggcaaatcaagcagacccccaatatcctcattttaataaagtccattttggaatgaaaaagaattagaaaaataatttagtcttattgctgaagtttagctattccttagccttctaagattccttgacaaaacagaattctcataataagctagttctaggtattagaattttctgagatgggataaattgtgagaaatttaaaagttccccaggtcaaatttgggacaatttgagcaacaaaataattaagaacagtggagtattacgggccatagaaagtaataggaatccttgagtgcatatggatgataaagaaataactagatagctaaatgagggagatggaagacttttgctttagtagaatgccagagacagattggcaggaatggaaggagtgctgaggttggaagctcagtttcagcgtcattgtaaataatgagtcaggcagtaccaccctaggtgctaaatctaggggtactttgggtgaggaacatgatgtttacctatcttacactatctcaccggagacttcttattagttgcaagacaaatacagtaactatgcagtggagaaataggacaacaccttgaccaggtgaccaaaattaacatcacaggtggaaggagatgaacatctgtgcctctggatataaatgcccttaggaggacactgtctgttctgtagtcgtctaacctgactcgaatcacaaggaaacatcagagaagctttaaatgaggaacaggaagatactactgtttaaaagagagaaaggctgtagtctccaagactgctggtatcataaaacataagggctgtgaaaatgtttcagattaaaggaggctaaagagttgtgactgccagatgtgaaagctgagcctagactgattcctgttctgtaggggagaaaatgctgtgaaggacattgctgggtcagttgacagaattggattgtgggcaatagtgtaaagtagtttaatttatgcaagtagagaactccactgtggccatgtaagaggatatccttatttttaggaaacatgcactgaagtatttagaggtaaaggaccacagggtttacaattcgctctcaaatggttcaggaaaaaaatactgtttggctagattgattgatcgataggaagggaaaaggaggtggagagggtgagaaagcagattataagcagatggggcaaagtgttcacaatagataaatttggtaaatggcacacaggtgtcctttgtatattcttttttttttgagacggaatctcgttctgtcccctgggctggagtgcagtcacgcgatctcggctcactgcaagctccgcctcccgggttcacgccattctcctgcctcagcctcctgagtagctgggactacaggcgcccgccaccaagcccggctaatttttttgtatttttagtagagacggggtttcatcgtgttagccaggatggtctccatctcctgacctcgtgatccgcccgcctcggcctcccgaagtgcagggattacaggcgtgagccaccgctcccggcctgtatattcttttaaaaattaaaacaattcttaattatgggtacataataggcgtatacatttatacggtacatgtgatattttgctacaggcatacaatgtgtagtaatcacatcagggtaattggggtatctattacttcaagcatttatcatttcgttgtgtgtatattcttattctggcaactttttggtaagtttgaacttatttctaaataaaaagtttttaaaaagttgtctagagactgaaagtaaacaaacaaatacactgggcatgaaaggatcttttttttttttttctttttgagacggagtcttgctctgtcgcccaggctggagtgcagtggcgtgatctcggctcactgcaaactccgcctcccgggttcacgccattctcctgcctcagcccccgccccgagtagctgggactacaggcgcccgccaccacgcccggctgattttgtttttgtattttgagtagagacggggtttcaccgtgttagccaggatggtctcgatttcctgacctcgtgatccgctcgcctcggcctcccaaagtgctgggattacaggtgtgagccaccgagctcggccgaaaggatcttagttataaaacaaatttagctgaaatgttgtcttaccttaattggcttgaatttttctctaggtacgttcgatttgcttgtctcgaagtaatactttaccctttttaatattatttaaattgttcattatttttacatatatagtaatacataaaattattctcactgtaaaagatttaaatccttcagaagccaaacatgatttttgcctttactatattccctcccttcctctcctcagaagagaccagcttaagtaagaatttggttgtgactttctagtcatagaaatctgcaaatctggcttttgttaaataaatgcaaatccagcttttattaaaataaatgggattttgtaccctacacctttcccaggattacgtttttcacttaatatattttagagatatgttttcactgtttgctttatttatataatgtctgaagagagttgggtaattgtactataatttatttaattatctattgaagatcatttgggtctaattctaatttctttcgcagcacagtgtgtatcataatcttggtacatgaaaccgtggtacatgaaaattttaataatgcatcctggaagtagtattgctgtgtcaatgtatgtgtgtttaaattttttaataggtcctgcaaaacggacttctaaacagactgtaatgatagtatatgcttattttccggcatctctgccaactgtggatattatcaaccttgtaaatttttgccaatcacagggacaaaaataatatgactttttacgtgcacatttccacatttattggctagtggatttcttcttcagtgtacgagtgcatgtcacaccctttatcttttgtcctttttggttgtctattccttatgacctgtaggagtgttctttgtttattctaaatagtaattgttttgcctgttaaagtgccttaattattttatcctagccagttgcttgtcttagaagtttaaaatttttatgtagcaaaatcttttactcttttctttaaggcttctggtctttgtgttttgcttagaaagactgtccctgttttaagattattttaaaaaatacccattttttaaaatttttatatttatctctttatatggaaacttgtatatgggtttaatttcatttttgtcttagtagacaaccaatatccttagcatcagttattaaatattttctctctactgtaaaatcgtaactgaataataaaattccgatatgcacaggaatccctgtctgtattctttattatgttctattgatctgtatatatgttcctgtgccaattccatagtttcaatttttcagggcaaatcctacaattttttttccttcttgataactttagaactacttgtcaggttccactgagagttctgctgcgaatcttattgactgagttctctgtatgtaaaaagttctcctggcatgaaaaggaactcaggctatggaatcaaataggcctgtgtataaaccagttgttagctgtgggaatgataattgcacctgttttacagaaatgtcaagtttacatgagacaatgcataaaggtgcaaaagctaatgcttggtgtacagacatgcttacaaaatattatgtatatctccatagtgacagagaaatgatatgttctgtgacagtgttatagcttattaatcagaatagccttgcattcatttaagaaatagcatacttatatacacatgtgaataaaatttctgtctttagtgatattccacttgatacataaataaacacattagtgtattcctgtactcattcatttatttctttattgattccttccagtagtatcttggtgtggttgctgtgggtaggcgtggcgcttggtgcttgtggatagagcttatagatatgccttatggtaaatgccgcctggagggagggcagacgtgaaacaaatagttgtacctaattttgtaattacgattgagaaatacggtgtgaagaaaagttacagtgtctgtacagctctggctcagtttgatgaagttcactttgtcaaatagctcagtttgttgaatttacaaaatttgcttctcaaacatcattttaaaagctttaatgagaatgagtgtagatcagattctgaagctggactctgtgggtttaaatcctgattctgccacttatacatgctttgtgaccttgggtgagttacttaacctctctgtgctccagtttcatcatatgtaaactgagtagagtatgaagccactaccgagggtttttatgaagagcaaatcagttgttatatgtaaaagtttgtggagcagtgtctggctcatagagtgttgtagagggtgtgttagccattattgtgacttcgttagcatccaaatttttaacacctcatatggaattttagaattatttatttttcccaaattcttttaaagaccacctttctcatggtataacttacatgcagtaaacccatgttaagagtacgtgctaagagtagcaccatgttaagattaagttttataaatgtatgcacccatttaatccccagtacaactaaggcagaatatttccatgagcccccagggttccttggtatctatccctctgcagtcatttcaaattccttttactgcatttgttttaccagagtgtcagtctttgtcttttaacatgtttagaatttttaattcattttttggtggataatgtatatgaaatttgagatactagttatatggtctgttatactaattatcacttctggcagtctctattttttgcgagttttgagtaagtgtctatgtttaattgcttcttgttagaaaccaaaatgtcagcattttacttatgatagtattggttcaccaagcaatttggtgaacaaattaatttatagttaaatttcttttaactgtaaaacaagttaatttgttttacggtataattgaaagtttgttttcctacataataaaatatgtaggtaagtctgtgtgtggtggctcatgcctgtaatctcaacactttgggaggctgaggtgggtggatcacttgaggtcaggagtttgagaccagcctgaccaacatagtgaaaccccacctctaccaaaaaatacaaaaattagccggactacatggcatgtgcctgtagtccctgctactcagggaagctgaagtgggagaattgcttgaacctgggggcggagattgcagtgagcctagattgtgccactgcactccagcgtgagtgacagagtgagaccctgtctcaaaaagaaaaaaaaaatgcagaagaggcatttagctttttgccatttttttttttttttttttttttttgctgttgcaggggggatgttggtaggagtggaggataatttagtcttagcagaaattaatatgtagaagtcttaagcttttctcccttagattgccccaaaaggacagatttaacttctcagcatctctgctttgctaataccaaaattacctataaggatagataccaagagagggagggcactgtatgagtggtccagtatttggacacacaacttttccctgcagtaatcataatgaaagtaataatttaatgggagctgacattatttcgtacttactgtgaataggcatcatgttaaagcctacgtacatctcatttaattcttcaaccccatgagtttgatggcactgttattcccattttacaggtgatgaataagaatcttagagaagtaccttgcccaagaccacacacagtgggtttttgttgttgttgttgttgtttttagattttttttccttttagtttagaaagagaaaaggaaggaaataaagaaagtttgttaaaataactattgcataaaaggacatctgggctagatgctgggatgtacctcttccagaatagggactgatgatttaaacaaaaaaaaagacaaaaaagaaagaaaaaagaaataaattattcttctcaatactgtttgggataattgcattgttttcatcttttcaacacacaaaacagcctctttgggaagcactgtgatgagactggcaagaatggctggtgcctcgactctctagaatggtagggggagccctgagagaggcattctactaaaccccactgcaagcattcgcattctttactcctcctacttttggaattgggaaggaccagactcaagctaagttctcaatatattaacttttagggatacccactgcctctcctgaccctcttctagcaaactcccctgctggccccttttccgccagctagctgcagcaaccataccaagggccaggaggctgcttggtggtctcagctaagcaaaagcggggtatcatcatcactgttcgggccacacatagttggtaagtgatggagctgatagcgggactctgcagtctttgttcttagtgttatttctcccttgaatttaaatcttgaaggcagtgagttttttgggctaaataatttctcgtatttgccaaccctttgaactttatagatttttaacatttgtttctcactctatcctcaaagcatccaatgcggtagggaaggaaacctgatgtttcattcattgcgcaaacgtaggcaaactttttctgtaaagggacagcgtaaatatttttggctttgaggactctgtgatctcagttgcagctatgcagtttgtgactgttacaggaaagcagccttagacaatatgtcaattgattgagttgtggctgtgtttcaatagcactttatttacaggccgggcacggtggctcacacctgtaatcccagcactttgggaggccaaggtgggccgattacttgaggccaggagttcaagatcagccaggccaacatggcaaaaccctgtctctactaaaaatacaaaaaaattagccgggtttggtggcatgtacttgtagtcccagctacttgggaggctgaggcaggagaatcgcttgaacccggggggtggaggttgcactgagccaagatcatgccactgcaccccagcctgggtgacagagtgagactccgtctcaaaaaaaaaaaaaaaaaaaaagaaaagaaaaaaagtactttatttacaaaaaaagaaaaggcagcaggtggaatttggccctgtttgtagtttcctgacaccaatagtaatagactgatctatttggggacatcaggacatgtcagccacagagaaggtgacttaggattcttagtgccaagcattgtgtgtggtccacttcctaacctttcccaggctgcagcacacagtgccactcacgagtacctttaggagattcaaggcacaacaataatagtgataataactcatctttctactggatgcattgttctaagtgcttttcacatctgacattaatctatggacagctgagtgacatgggaaattgaggtcctaaggaaaatagcttgctcaaggtcacagagccagtgggtggtgaaactgggatttgaacccagatagagtggttctaagcttgtgagctcaagtccctttaccttctctctcccccattataggatttctcagtttgagatcatctttgaagccttactctttgggaactgcctcttccgaacactcatattgagtggataaggttctgtgttctctttttgagacatttattttggagcagagctacaagtaaaggactgctaactctgccaattttctgttacagctggatagttcaagggtggagcaagatcatgcaggaggtttctttttgctcatccctggtctacaccagagactttcaactgcagaagcactttaataacagtagagatgatttattaagtgtctgttttgttgatactgtgctaagtgcattaaatatataatattggttaaaatctcacaatgctgtaaattaagtggtattattcccattgcacagatggaaaagttgaggctcagttatggataagttatttaaatctctgagccttagtttcctcatgtggacattatgatagtcctatctgttagggtcactatgaagattaaatgagttaacacatgttaaggattctgagcaatgtttggcactcaatagtgttacctgttattgttgctgttattattagaacatagtagtaattgtagaggtgaaatgctcactttttatgagtatttgtgaattagaaataagcacgtgagtattcaacatagtgcctaggtgttaatagatggaacttatgattatttataggaagaaactgtgtaaagttctgttccttttaatttaaaaatacctccactggtgatggttttaaaattaaacattaaaatattaaaagtcagtctcttggttttgtttgtttttgtttgttttgggtaaaattgctccctgcaaaaacagccccagatattcctgtttactgtaaattaggtagattggatagagttggcactagaggatagatatgcttgacatagtaaatgatttacaaggtggattgtacagccataaaagcagtaacttagaaatatgcacaggagagtaaaataatttgctcatttatgttaaatttcagtgataacctaattgtaaaaaagttttattttacatatgcactctattatataccatatatcactatgcatattttttgtatatacttatttctctgtggggttatgtccagaactgtgagtattctatgataatggcaacttaaagtatttgttcaatgttaagattgactatatacacgatttttcttttaagtactgaccttaggacttaacccctgccttaagctgcagctcaactctataatgaaatgcagaaaaggaacatttttcccacctccataaattaaataaccgataattaattaaccttttcatttcttttttagctctctaatctatgtgttagtagaaactaaagcaatgctatacaattcaaattttttttgtgacagtgacatctggtggttcctttttaattctcgtgatttctctgtgcttggctggttgttggaaattccgaagaatcattgtgtgaactgcttcgcttggcatttaacactagctagctattgagaatcaagttagtcccattgacgtggcttgaactttgaaaacctcagtgctccatttggacgcagcccttctctgaagggaacaccagccttccttggatgaatgaacattttagaatttgtgatgggcgaacactgtcttgggaaggatttctctttaattcagagaacttaggattttgaataagggatggtatctgtgccagcctctctgctttactcatgaggaggctggagccctgagaaatagagtgtgttggccaaggtctcactgtgtcttccaatgtctcactgtgttgggcaatgtctcactgtgttggccaaggtctcaccatgttggccaaggtcacctgcttcttggtgagcagaggttccataacttatgggttttgtgctaccagggagcagtgtggcattgggctctgtgctcataaattacgttgttgttgtttttagacggagtttcttgttgctcgggctggagtgcaatggggctatcttggctcactgcaaccgctgcctcccgggttcaagcaattctcctgcctcagcctcccaagtagctgggattacaggcatgcgccaccacgcccaactaattttgtatttttagtagatgcgggatttctccatgttggtcaggctggtcttgaactcccgacctcaggtgatccacccgcctctgcctcccaaagtgctgggatttcaggcatgagccactgcgcccagcccataaattatgttttttatgctgggcaacccactagtaagaaaggtctgggagtgaaaggctagagggtaaaggctagagggcaaagggagttaacatttttcactacctatttgctgtaaatatcccacacccggcttttctctcatccaaaagaggctcagcatctttgacatgaaaaagagttgttgaggaagtatagttagggatcccagccccatctcctgagtctactggttggtcccatatctgagaatttaatatcctgtgaagttgtatttattgagcctgttttaagtcggacctgttctgtgagttatctcacatccttacaatcccagtgggcggctggaatctttattgtacacaacaggaagtagaggattgaaaggctggactcacctagggtcagaggtggagccaggattcagtcccagacaggtctaacctccaagcctaaatttatgctttccgctctactacacaggctgtgtaattaaaatcacttgtgtatttatttatagtgcgtagtacttagggagtagaggcagatttgcttcctagacacttgagcacatgacatggactttgtattgtgactatgtggacacatccaggagtattttgtgcttgtgagagaagggagggctcatgtcatcaagtcatgactaccttgatgggcactggctccatgccaggcactttcccctctgatctcctttggtcctcccaacagcttcctagggtgggtgctatgggcatctctaatttacagaagataactccagagtggaagggggaaaggattttctatagggatactaaggaagaaaaaggaggagagaatgggtgaacagcaggcctgaagcacactcgtgttgtatctggccctcccatgctgaagttgataaaccacatggtgagccaggcaggtgcaattaacccactcctttcttcaagttcattataaccctgctgccaaatccaaaggacttttataggctaagtaagatgtcctactaataacctcttaaatttcttaaatttttccacatagtgacagttgaaatcaaggcacagggccctttatactagcaaactacctgctcccagaggggactttggttagtcagtcatggttccatggtatttatatatcagcatttgtttcttacaaatgtgacattgaaaatgctcctgtattcctgaggtctttttaaattttttcaaaaaaagatcttaaaggcattgtgtgtagatcacttttaggctgctttattactagcactttgtaaacactgtgagtgaagatggactatgtttccgtttctcctctgctcctttaatccataatagtgagctctgtgggcattattgttctctcaactgtagacaacatgactgtagtaaactcttttctaccttggggccttaccttatacatttccacctgcctaattccttccccaccaagctccttatgtcctcccttcctctatctcctgatgaagtgaggtccctttacctggtggtttcatcatgggcgtatcctccttctcccagaagacttccttaaagcaaggactcttttgctgcagtttcactagcgcttggcgtatcgatgctggtagttcctaaatgcatagaaagtaatctttcccattaaaatgcccgttactccatatccccagtttctactattagatctgtgattttttggtaaaaatgaagctttaaaaaacatagaaccttacttcatcaaccctaaggcctagagaaacaaagcaatacaaaggaacacagaactggctgggagcgttggctcatgcctgtaatcccagcactttgggaggccgaggcgggcagatcacctgaggtcaggagttcaagaccagccttaccaacctggagaaaccccgtctctactaaaaatacaaaattagctgggtgtagtggtgcatgcctgtaatctcagctacttgggaggctgaggcaggagaatcgcttgaactggaggggcggaggttgcagtgagccaagatcgcaccattgcactccagcctggacaacaagagtgaaactccatctcaggaaaaaaaaaaaaacagaatttacgtgggattatatgagagcacttacctggcacaagagcaaccagggaactatattaatcctacacctggagaacatggaaaattatttttaatctcaactgatgaatgtttaaaaatttctaaagcatgagctttatgttttggcagatgattttactgttgttttgctgttattatttttttaatccctatttctgaaaaaatgtttgaaaatctccagttttttctaagtctattaaaaaaatctaaaaaaattattgcctggaatttgacaaacctggacaaattaagaagataaacttagtgttagttttttttcaggtgtgatacttgaaatttgagaaggtcatgttttgttccctgcaaggaccaacaacagtcgttacaggtggggacttggaatgtgagtgtgtctaatgtgtgggcccctattgctttctttccctttgattaagaattctgtaggtcagttaaggtttcacaaaggacttgctttgatgctaatcctttaaggagggtatgaggggtgcttgtcctttgcaaacccagttatgggggagctgaagctgattattacatttgccatcaaagaacattgatgctctttcatgcaatatgaaacttaaaaaaatgtggcactgcagataagatgcgactagttggtagtccttgggatttagttggagagtttaaatgctgtagaaggccatggactactttttgaacttgacaaatagattacagagaattggatgataaatgtgagcagaatgaaaaattattcctaacagatgagctcagggtacgtatatatttttaaaatgaattttgcacaataataaaggtgtattttaaattaattctgacttagaaaaatcagtactttattcaagttttaatagggagtgatgtgacttgagtttatgcatttctcatatgattcctttaactaggaatgtgctgtttctctttatgagagaaattcaatatttgaggaatcctccaggtgtgtcagtcactatgataatgcttctgatgtcagtctggtttcccattttggacatcttgatttacaggagtggatgccatgtagacacgtgtttgtattccgtagaacctaatacccatggctcttagtccctgcctcagtcctggggggaagttggggcatcctcttcatgtctcatctccatgggaatggtccagatatgccccaaaagaattcatgacttgccagagttctcaacagttgtagcgttctttgagtccatgataccaaacacacagcttcattggtcagtggaatggaatgttgggtgggaaagctccagtgagaaggggcctggttgtgtgggggtgggcacctgcccacctgtggtcttcattgaggaggaaggtatctgcaagccctctcaaaccttgtcatctttgctaaagtgcggtggttaaatgagcgtggtagaatctgttctcaggcctgtgaagtcatccctatgagaaagatggtaaaatggaggacagggctgagggtgaggaggaggaacgcggaggaggagggaggaatgtggaggaggagggaggaacggagttctagagaagcgatacagctttgtggatttacagtacctggcgttattttttgtcatgttacttcctacttccttttccttcttgcagtaatatttgtcacatattccttttcaaaccacgaagtgaattaaaaatcagatagggaggcctgaaaaatttgtaaatctatttggtctctttggcagttaatggagagtattgacattactactgttaatagcatatttgtcatctttactctttgttctctagagataaaaataatgtaaacacttttgtcattaatatcttcattaagattcttaaatgaacatcaagaacctgctcttccactcaaatgttcttgcatgcatttttgctactcagaatatgacaaagctagcgagttaagatggaaattgtttggaaaagccttagtaggtgatgcagctttcctcactctgtgtcagttctacgatcaggatggcagtttctatgatctggaggcagaggtagggttcaggctgatctcccaggaggcagcaggccctgggtgctggccttatatctgtcagctcacctagggaatccttcaactaacaggtgagcccattttttaacgtgcaaaatgaaactgctcaaggtgaggaccttccacctccagacaagggtgctcagccagttagttagctaaccatgatttgctaagagtccatgaagtacagagtactgtgctgggctggaaagcagattcataaagaatagaatggtgcttgactccaactagagagtcaagataggctcttgaacaagttagatactgtttggaggcagtgtattatttgggagccaggtgtggttcaatgaaaacatctgttacaccaggccctacagtagtagcacttcaaggttggccctggtatgggagtagggcaggcaaatgcagctgcctttaaggagggaactaaacaccgaggttttcctgtaacactttgtatttgttggcagtgtgagctctcctgtcttactttacttatgttggaaggagtcaggatgctcctctgagtgtgcgtgttgtaactggagggcacacggtgagcccaccagtactggggagctaagggaaaccaacactggaggagcactaggaaatttatggtgagtatggagaagcaaagagactttggtggaaacatctagttctgctacatgaagaatacatgcgtgactactgagggccaggtgggagactgtggaatagctgtcagtgccaaacctaggggccctgatgggaatctcacacaaggaaaaggagcttcctgaggcagcagcagaaaagggatagaatttgaactgagtgtggggaccaagacagacaggagggaaaggaagcactggtctttctgtagggatatggaacagatgcatgagcagtctctgccttttggtgtttcatcctccacgtggaccccacatcacttttcccaaggatgcaggaaactgtatttgctggtacccagggagagagcggttggccatctccgggtccaagtataatttcccagaattggaaataagagtctcataaagatataaatgagcatgtcaaaattttatttcatccaccaattaggaaaccagtgaaatggtaaattgatccaaacagtatttgaggaactagtatttataagcttaaggaagaatgttagattaagattgctaggttatacataaagctgggtaataccttaaagcaggggtccccaatgcctgagccgtggactggtactggtctgtagcctgttaggaaccaggctgcacagcaggaggtgagtggtgggcgggcgagcattaccacagctccaccccgtgttagatcagcggtggcgtgagagtctcaggagagctaaccctactgtgaaatgtgcatgcaagtgatctaggttgcgcactccttatgagaatctaatgtctgatgatctgaggtggaacagtttcatcctgaaaccatctcctcactgtcccccatcatctgtggaaaaattgtctcccatgaaaccagtccctggtgccaaaaaggttgggaactgctgtctcactgagcagcaaaatcataatctttgaggtagtctttttcgccactaaaaatcctgtaagtcaacatgtaacttcacagtgtgcggactccaatcagacagcagatggcaaaattaaacacaaatacactcttctagagagttaaataatccttgggaggcttgtaaaacaatgctaccatattacattgagaggatatggcaccccttcatctcccaccccctccccatcctgcccaactgtctaatttccaagttttagatagtttgtattgacattaataaaatgctttggttttaagcctgagattgaaccccagtttcttcactgtgtaatgttgggcaagtaattaaactacaactggcttaacttgctgtatgttgggaggaacacatgaaatagcttttgtaaggttgtaaggtgcctggcacatgataggtactcagtaaatcttagttcttctcttcacctttccttttttaaaattaagacacttccaccttttgtctggcctttatagaccacatatgctttatttagaaaactctctgccccgtgattactgtttcaacaaaatggagagtttcgatattcttgaaatcgtgtttttttttttaaataaaaaagttattagatacagggtcttactatactgtccatgctgaactcaagccatccttctacctcagcctctcgagtagctgggactacaggtgtgcaccacctggcttgatattcttttttttttttttctttttttgatggaggggtgggaatacttcttgtttagatgaaaatattagtcttatcttctttacacggagggttggcttcccaagttatcctttgcgtcgctcactcagtaagtattttagtgtccatgctgaggtttgtgaggaggaggagaaggcacagaaggctcccaggagtgggctgtccatgtaccctattgttggtaagtgcagagggagtctgcagagctgccggagggactatgagctgggcttatcatagtgagatttgggttcctggagaatacgttttcctcccttctctgtaactactcacatgataacctgtgtgctggcccttgattttacctcccttatggagtatgatattaatgtagattaataggtcagggtcccaaactcaaactcagttctgccactgtttacaactttttttttttttccttgagatggagtcttgctctgttgcccagtctggagtgcagtggggcaatcttgactcactgcaagctccgcctcctgagttcaagtgattcttgtgcctcagcctcctcaagtagctgggattacagaaatgcaccaccatgcctggctaatttttgtatttttagtaggaatggggtttcaccatgttggccaggctggtctcaaactcctgacctcaggtgatccaccagccttggcctcccaaagtgttgggattacaggtgtaagccaccaggtccagtcggttcttctttttttttttttctttttttttggagacggagtctcactctgtcacacaggatggagtgcaatggcatgatctcggctcactgtaacgtccgcctcccaggttcaagcgattatcctgcctcagcctcccaagtagctgggattacaggtgcatgtcaccacgcccagctaatttttttgtattttttagtagagagagggattcaccatgtgggccaggctggtctccaactcctgaccttgtgatccacccgcctcggcctcccaaagtgctgggattgcaggcatgagccactgcgcctggccaggttcttctttttagtatttacacttttgttttttctgcctcaccgcagaatccagtatggtctaaaccttgttcagtattaatggccacacaagggaaaagatccctagccccctttcctcatttctgtgcataactctaaatgaggtgtgatacggtaagtcccttggcggtccaggttccattcattcattcattcattcattaggcaacaagtatttattgagcaaaccctggtgcgaagccctggtgttttttctgtgtatgtaagagcctgctctgatggagacagagggtgaccaagtaaacaaggaagatcattagagattatgataagtgctatgaatgaaacaaatgaaatgatgaggaactttatgtaagctgctattcctagtaattttaattagggtgatcagagatgttcttcttgaggaggtggctttctaagctgaaaatcaaaggatgagaatgagtcagccatgggaataattgagcaaaggacattataagaaaggggacagtgcagagagctgtgggatgtttgacttgtccaaggaacggaaagaaagacctgtggctggagtcgagtgagtaaggggatgtggtcagaggctggcggggctgttttagggctctgtagatagggagaatgagtttgggatttttctaaatgcaatggaaagctcttgaagaggtctagaaaactggaatggtgtatgcttattcaaaaacatgaagtaaaagaatgatattgttgtcatgtgaagaattgaatggagggtgtcaagcacaggagtagggagaccagtgaggtggccctttggaggtctcgtggcttgggctatggtaagagtggtagggatgtcagagaaggatgcttggaagattaagctgggttgtggtggaccccggatacctggatgaggagcttaggtttggtttttgcagctgtgagggagctgttgtgaatgtgtgagtttttgagtgagtgcatgtgtatttgtatgtgtgactgtgagattgtgtgtgagtcactgtgtctgagtgtggagtgtgtgtgtggtcttctgagtgcatatgactgtgtgcgtttctctcctgttgcagctgtgatcaggccagtggcatgaagcaaagggctatcctgtgtggcacagagtaaactgggggaaaggctggtggcagggagacgagctgagagggtggtgcaatatgtgaaatgaaggcccagaggatgctcacttggctagccatggagaaagaaaagactacatcgggcaagtcctcttatttattttactctatagttgggaagaatgagatttaggagtgaaaggtaacttcataaaagacgtcatagtctctttaaattaggccagtttgatcacttgctgagtattttaccagccttattaaaaaaaaaattaaacgtcactgaaatgcatctgcttgatttctgtaaacagaattccataagcgttaagttgattgattctactgcctgctataccttcctgccaggaccactctccccaatgcgtgtattcattttctcttttagaattcttgagaaacccattgagaattcttgagaaactcattgtattttttatttcccccaggacgttttcgaagatgccttggaaaccatctcaatgtaagtaataacataataaaaagtatgtagtaaggaaaaattgatggttgtcttacataaaaagtaaatatttcattctcattttttggagagtacggcaatggctattttcagaaaaaaaaagtcacttttctataattaaagaggatgtgattatatttaagaaaggatctatctaatactttcagatacatttctgagtattatttcttgtaacaaaataaaatatttctcaacaaagtatttgtttatagctaactcttttaatagttgttcatatttatgtcagtctcattttgtagatttttgtgtttggtttgcacttagttttattaaaagcattcactgtaagcctatatagtttttgtaataattctaaattgctaaatcatattagatcaaatggaatattacaatttacttacctgcttctccattgttagacatttaggttgtcactggcttagaaatgtagaactaagttttacatgtgtatagctttgttatattttgaattatttctaaaggttaacataacaaatgtaggattactgaattaaaagggatgaatatgtttattgttctttgtatatctctaattgccttcctgtattagttaacttcagcttctataacaaaacacaatagcctgggtggcttaatcaacaataatttattttctcacaattttggaggctagaagtctgagttaagggtgccagcatggttgggattctggtaggggctctcctcttggcttgcagactgcctccttgttgtgttcttacatggccgagagagtgagagcaaaagctctctggtgtcctttttttttgagacggagtctcgctctgtcgcccaggttggagtgcagtggcacgatctcggctcactgcaagctccgcctcccaggttcacgccattctgctgccttagcctcccaagtagctgggattacagctcccgccaccacgccaggctattttttttgtatttttagtagagacggggtttcaccatgttagccaggatggtctccatctcctgacctcgtgatctgcccctcttgtcctcccaaagtgctgggattacaggcgtgagccactgcgccctgcctgatgtcctttcttataagggtgttaatcctatcctgaggaccccactctcctgacctcatttaaatccgattgtctcccaaaggctccatatttaaattccatcacattgggggtttgggcttgaacatgtgcatgtacaggtgggggtagaggggcaccgtttgttttacagtacttccacaggagtattatcaatttacttggctaccaatactatgtaagcaaagtggtttaaactgtcacattatcatcactgggtattatttcaaaaacagttttgcaacttaaatgatacctactttagtatttttaaaaattattttaaaaatacattgcatcttttgtatgacttctaattttcttttgtctcttagcttttttcagaatgtttctcttaacatacttatggactttaaattatatataccctaatcttttgtcatatttgctatagatatttcctccagactgcaatttttctttattttagtattatacatttttattttgtccaaaagtttcatgtttatatgattttttaaaaaaaaaacttaattgtgattgggattaacctattaattaggagcagtttcagacttacagaattattgaggaggtagtacagagtattcctgtgtaccccacccaggttttctctattattaatttcttaagttagcatggtacatttctcacaattaatgatcaatatggatatattattgttaactacagtccatacgttatccagatttatttagtttgtacctagtgtcctttttctgcctcagcatcccacccaagataccactttacatttagtcgtcatgtccccttaggctcctcttggctgtgacagtctctcagactctcgttttcggtgaccttgacagttttgaggagtactgtcagttattttgtagaatggcccttaattgagattggtctgtttttcccccctcatgatttgactgtggtcatgtgtttttgggaagaagaccccagatggaaagggccattcttatcacatcatagcaaagatccacgatatcaatgtgacttagcactaccgatgttgaacttggtcacatggcatgggtagtgtttgtcaggtttttccactgtgaagttgccctttttcccctcctccctttttatacagtactctttggaagataatctgtttatgtgatttttaagaaatcacttctatggtgggcaagtgatcgccattcagaaatcttataattattcaaccctgctcctcccttggtgttggcaggaattgagcttgggctatagtaggtgatcacagtccaggggatggaaaaggatcaggccttggggctggtgattggagttcaccagaggagacactgcttttcccagcgggagctagcatgccacacacaacagagaggggtgcagacctcacagaggaggacgggtctcactgaccagtgggagcagtgtgacccctgagcagtgcacattgatgcttgtgcttctctgagctcccactggcttcagtaggctggtagtggctttacctttgggacctcaggaaggcattgcaagcagtttttttaacatctattagtttttaaaaaaatcaaaccacagaaataaacaaaagccctaaattcaacccagctgaagttaatttagattcctatctcacaccagccctaaaattgctagcccactattccagcaccatttgttaggtccatgagggaaacaatttatatttgatacctcctttgtcaaataagttcattaaaataataacacactgtttgggggctttccattcagttcctttgatctagatgcctgtgtttgcacaaaaacaactcttttgttcaaccgagttagatggtttaatattagcattgtctggttctcagaacatcatccaaaatgactcctgtgatggagatgcttttgattcgtgactatcagaaacccctttgtgtactttttgtttttgctttaaaataaattttattgtgtatatataaggtatacaacatgatgttataagatatatatatatatatatagtaaaattgttatatagaagaacaaatgacgatatctatcatctcacatagtttcccttttttttttttttttttaagacagagtctcgctctgtcgcccaggctagagtgcaatggtgtgatctcagctcactgcaacctctgcctcctgggttcaagcaattctcctgcctcagccttccaagtagctgggattataggcgcctgccaactacgtccagctaatttttgtatttttagtagagacaaggtttcactatgttggccaggctgatctcaaactcctgacctcaggtgatccacctgccttggcctcccccaaagtgctgggattacaggcatgagccactgcgcctggcctagttacccattttttttcctcctgtggcaaggaagaaaaatctaatttaatttagcaaaaatcctgaatacagtgtactatttcttattaactataatcctcatgttgtacattagattttttagcttgttcatccttcatatttgctagagaaaccccttcatgtgctgttaaagtggggaattcgagaagcattgtcttggtgtcttttattctactgtcaactctgttatagtttttctcatcctgaagactgcagctccttaacactgcctcagtttctaatgaccacgcattctcccttcattgcctccagaacttctctgtggctgtatttatctgccagcagtttcttcctcttgtctaattttaacttccctgtcctgctcagtttaacaaatccaaaggtttccccattttagaatgtatcttgctcttttaggtttctggtgtgcattatttctcgtgtcctttagactgtcgcttaaacgtttgtgtgtccttttcaatgttgctgaattgttccactcctctcaccttggttatagcaacacattataggaacccttctcctaatagagagagatagagcccaaaatcagaaggggtagccagattaggtgctggagtccatacacgaagaatcttgtagcagaggcctccattcagagtctgcagttgattttgatctgattttaataaactttgccttttggtcttgtgcgtacttttgccttacagcgttctgagaggtattgtaaggggggttgtttccgaagcagagcttgttggtgatgacaaaaaatggcagtgagagaacaaagaaaatattacacacagccataaaactccaaagcacagcggtgtggtttcattttgccttcatgcacacaactacatgtatcttcctggggagacgggactgaccacacttgacagtcagacttgaactgtagtcccagtttgccatttactggctgggaggcctgggcagtttctctgagcttgttttctcctctcatagatttattgagaggattaaatgaaatttaagttaaatgtgataatgggagtaaaacacatagtaagtgctcagtgaacatcggtacttttctgctctcccttgtaagagtgtgggttctccagacaaatagaaccaataggagacataaaatgtctatatatgaagagatttgctgtaaggaattgactcatgtgattatggaggctgagaagtccccagttctgcagttggcaagctggagacacaggagaagtaatggacttctagtccaagtcagaggcctctgattataaatacatgttaattgtaaaaaatttcttcagttgtttttatgtgaactttttgtttgtcctaatttcagggtttgtcaatatttctcacatttcctcttaaattggtgatactataacattccctttgtgaattctgcaaaacttagtagagttctttttccttacacttactgaaccatatattttgatcttatgtttctggtgcagagagcaagtgcttcaatctctgtatcaagatgcagtgctcttgccaacctgatgattaatttcttccagtgagtattttctcttgaatgcctaatgaaaggattcacactaacagatgaaggaggccttaaattgtttccacaaagcaaatagtttcttatttttctttttctgcctaatgaatttaccactctcaacacagatttttcctacctctggatctttgtggtaacgattgtgttattttaactattttgagaaattgctagtttttctggcagtttctcaaaatagttaaaataacacaaaataaaataaaataaaactgttaaaataaaactggtaggtcatacaaaaatctccaccatttagaactggaggaaaaattagagatgtacaaaaatgttagtagtacattgaccatgttctttttaaaaattaaaataggccaagtgctatggctcacgcctgtaatcccagcactttgggaggctgaggtgggtggatcacctgaggtcaggagtttgagaccagcctggccaacataccaaaaccccatctgtactaaaaatacaaaaattagctgggctttgtggcgcatgcctgtaattccagctactcaggaggctgaggcaggagaatcacttgaacccgggaggccgaggttgcagtgagctgagattgtgccactgcactccagcctgggtgacagagcaagactccatctcaaaaaataataataataaaataaataaaataaaaaataaaaattaaaatagtctgtgaactttatgacctgttcggcataaggaggtgacctcttaaggacctgttgcatgatatatagaaatttgtcacaaataacatgcagttctagattagctatagtttcttgcttccttatttaacagttccatgctggtttgcacttctagtgctctgatgacggagtgtcccttttctcagtgttagtgcccagttgccatctctgacaatgtagtggtgggtataataaatctgttgataattaactgtgatatggcatgtgaagagtaaatattgtgttttgggaattccaaaagaaagctatcttttggttgggagatgggggtgctggcatttgctttgggttttgagggatgggtggcatttcagttggtagaggcagtgcagagggtcagaggtggggacatgctgggtgaacagttctgaggacagtggccagagcacagagcagtgggtttgaaacaccagtggggccctggacacaaatgaagttgggtcatggaggattcctggtcttgtctagtggggagaatggactaaccacttacagtcatcgtgatttggtgttttgtttttgtttttttttgataggatctcactctgtctcccaggctagagtgtagtggcgcgttctcaactcactgcagccccaaactcctgggttcaagtgctcctcccacctagcctcccaagtagctgggactataggcaggtgccatcacgcctggctaattttattttttgtagagatgcagtctccctatgttacccaggctggtcttgaactcctggactcaagtgatcctcccacctttgcctcccatagtgttgggattacagacatgagctactgtacctggctggtggtatttttgattaacctctttctcataaaaaccactgtgggcaatgggacaaaaatctaaccgggagtcctggttgggcactgattaattaagattttcttttcatggtagtttagagaagtcaggggagacagatcaaacttatgttcaaagactgttagaacagatgcaggtttaatatattctcagcagtggtctttcatattccagagcatcttacggaaatttcaaatttatccttacatagaaactcatatgtgttcaatggaatcctgaggtggtgtgaatacagtggggatgtatgtgtctattttcaagaactgctctgaatttgtacttacctgtagaaggtgaaataggcagatttttttagccaggtaattagaagcttacaatagaaataaaaatattttgatcgcttcttggccttttgtctaagatcaagtgtagtataaaaatattttgttttataacatttctcacaaactttttccttctccacaccttctctttcgaaccataaattgtagatgagagtgaagtaaggcttttagggccattttttttttcccctcattaggttagatcagttggtgatacaatagttttgcctgttttaattaagggtgaatatcggtgaatgatagttggaaaacatctgatatttttcttcagagtggttaagttataaatagtaactacagggagagttagatttgttttcatttttctctgctgttttttttggccccaattttcccctgtaggtaatataaatgttactcaagtctggaaagggagttttgtcctctcttaatttgattttcttaaccaagtcgacagtgattttattggatctaagatgccattcatattgttatcttatatattcctaaggaaggaaaaaaaaaaaaacacaatgaggaattttgtaggagaccttgcataaaggaaaggaaaaataaaatcatcttgcaggaaggcacagtaaggaaatgtgtatatttcaatcttggtattaggtagggaaggaaaaaaaaccctctaatgagattctccactcagagaatttttttaaacagctctattgcaatattaatttatatctcatatatattcctattttaattatacaatttaatgcattttaatgtatttacagaattatagagccatcaccacaatctaacttcaaaacatttttatcgtctgaaaaagaaatctgtgcctttttatagtcattatctattcccactcttagctggggcatccactaatctaatttctgtcaccctcggctggggcaaccactaatttaatttttgtagatattttatataaatggaataatctaatatgtattattttgtgtctacacatgtcatagaatgtgtagtacagatagatgctccttgactcatgatggggttacctcctgataacttcatcataaataaaaaatatagtaagtgaaaatgcattggataccctgacaaacccatcataatgttggaaaattgcaagttgaaccatcctaagttggggaccatctgcacttcattcctttttatggctgaataatattcatttatatgaatatatcacattttatttatctgttcatcagttgatgggcatttgagtcttttccagtttttggctattgtgaataatgctgctataaacaattgtgtacagtctttgtatgaacatgttttaaattatctgccatacagacacagaagtggaattggtaagttgcatggtgaacctatgtttaactttttaatgccctttagaatttgaattgtaagctggtttggagtctgaatacatataaatggtgtaacccccaacaacttcaagcaggttatttaactttaagtggatcaggttggtggtgtcctcaggtaattggcagaagcaaatgcagatcctctccctaagaacataactttgatttagggcagtcaaagttgctgtcaattttaagatgtatcttggggttagggatattccatgatgaaaatttgtgtgtcatagagtcaatggtatatagtaaatggaaataaaagttctttaaaaagctcaaggtaaacagcattcctggtgttttttccttgtttctgttaccactgggcttgcttctctttgtattttcttttgtcctgttagatctactctaatggtctgctgttgtgtttagacctgccactgtgaagttcttcatataaattcacagggggaaggagaatgtgtgtagtacacgttttaagatatagatcctataaatgctgcttttcactatgaggagtgacaagatttcatcacttgaaggaaagcctctgaaggaaagctccttagcaacactttggtgcaattatctcatcttaccaaggaggtcccagcagagatggaagactgagtcgtggttggggtgttgctggtgcaaagtgaatgaccagtgaacccctatgagcaggatctttgtgactgtggttgcctttctgcaggctcagtgtcctctctgactttctcagccctggtagcaatgctcagcttgtgtctgaaagccaggactttgctcttacactgagttccttgcctcctccataagtaaccttcttgacatggctgctgctccctgctgctgtcttgggctattttggtagttgtaatgggaaagaggtccaatcattgcttcttttatcactcactaggatgtttcacaaacacattaatttttatgtcccaaactgaactcttggtatccacctcctttgtttatctgaaaactttgccttttctgtaaatgtctccacccaccatccacccatttgttcaagtcagaagcttgggagacatctttgattcctttcttttcttttaatttccacattaccaagtctgatgatttctacctccaatatatatttcccatccgttcactttcctctctctccgctctattacattagcttaagtgactataagattttgcttggactactttaagagctggctaatggttaatgtgtgttcccgcttcttttgttctctccctctacttttccaactgcaccccacttactctccatacagcagcccaagttatcttattttattttttttgagatggagttttgctcttattgcccaggctggagtgcagtggtacgaactcggctcaccgcaacctctgcctcctgggttcaagcgattctcctgcctcagccttcctgagtagctgggattacaggcgcccgccaccgtgcccggctaattttgtatttttagtagagacggggtttctccatgttagtcaggctggtctcgaactcccgatctcagatgatccacccacctcggactcccaaagtgctgggattacaggcgtgagccaccgtgcctggcctaaaattatttttaaaaataagataatttgcgtcaggcacggtggctcatgcctgtaatcccagcactttgggaggccaaaacgggtggattgcttgagcccaggagtttgagaccagcctgaccaacatggcaaaaccccctctctataaaaaatacaaaaaattagccaggtgtggtgacacatctgtagttccagctacttgggaggctgagatgagaggatcatttgagccgcagaagtcgaggctgtgttgagctgtgatggtgccactgcactccagcctgggtgatagagtaagaccctgtctcaaaaaaaaaatttttaatatgaccaattttgaacatctacagaaagtaaagaggatagtaaaccaaaccttatatactaatcacttagcttctatagttgtcaactcaaggccaatcttatttcatccatatcctatccccagattatttggaatcaaatcctagacatgataatttatttctacctctaaatatattaaaatatatttcttcaaaacaaagacagtctctttcataattaccattcagataccaagatcaggaaattaacattgatatagagctatagtttaatctgtatgctttatatgacatcattttatctgtatttagcttgcaaaggtcgctttttaaaaaatcacaagactgttgtcacacctaaaacataataatatccgtccagtaactggtcagtgctcaaatttctccgactgtctcatttatttttttaacagtatgtttgtgtgaatcaggacaagagtgatccttttagaaattaaatgggatgatgtcactgcttgcttaaaatccatccatgagttttcctgtctaaagctgaagacccaatctacctttgttcataaggtttgaggtggttgggctcccacatactgcttctgcctcatcgagggcaactcttgccctcatgcatgaccctccagccacaagccttatacagttttttgtgagagtaaaccctgtgctgctccggattggagcgtgtttgccctcactcttttgagggctttttgctggccatcctccactctcagctggcgtgtcctcccactttctcagtgactccaccaaaacagttagtcttcccccatttctctgtcttggcatcttgtttgtttctatcactccatttctcattttgcagttaattgttacttgttttttgatcatctgtttttttgagctccaagttctataacgatgggtctgatctactttgcttgtcatggtgtacttggcacctatgcaccatgcttgtcacatagtaggtgctcagtatatatgtgttgaaaaaatgaatgtgtgaaattaatatactgtcttagtccatttgggctgccgtaacaaaatccattagactgggtaatttataaacaatggaaatttatttcctcactgctttgtaggccgcaaggtccaagagtaaagtggcagcagattgagtgtctggtgagggcccattcctcatagatggtgccttctttgtgtcctcacgtggtagaaggaagcagaaaatagtggaaagaggggaaagaaaaaaaaaagaagaaggaaaaagggcaaagagactccctcaagcttttttgttagggtactaatcccatttacaagggtggaaccctcatgacctaatcaccttccaaaggccccacgccatcactttgggggttaggtttcaacatatgaattttggagggacacaaacattaaaccatagcatgtactattaagaaaatataggtggatcctcagagtagactgctaggatttgcagtaaattaaagaaaaaaatgtagccaccattgagttcctaatgagtatagggcacagtgataattgctgtgattattcaaatggttagttaagggatcttttggaatacacagttaaaaaaaaagactgtggctgattgtgttcataaactcaaatgcatatataattaaataaagtccaaatgtttgggcatagtaaacactatccataattgttggtgtctccattgccatttttctctgaagggctgactcagttttcacttgacgtttgcataaatgagtgtcagaatcttaaaggatacagtgagctcattgccttttgttaactttttaccctgtttcacctgacatcctttttttttttctgacgccttcatccattcccttttcatctacctcacgataaaaataggaacctaagatgactaataaaacacccaaaagcatatacttgggagctttgtcttttgaaatgcgccaaacttcttcattgcttgtgttccgaaaatcatcagcctctctggtctcctttctttttccttcttccctctttcccccttttgtctctgcttgtggaacattattctacgaccagagaatagaactcctcaaaggcatagtgatatttggtttaggtacatttttgaatagtgtatagttcagtaccatgcatgatgcacatctaataaatagtctgaagacttaatagccatcaacaaattggaagaaccctgaaattgcctaaaactgaagagatatttggggatttacatataacttttattattgtataaagtaatttctatgttatttattttatttttattgtctagaatgaaaatattcataccagcagcggtcttttaaaattacctgatgagcagaatgttatagttagaatgaaaaatgttaaaactccatatagctctgatgaattaaccttttcaaaggtgtgggcatagtatttggtctcccctgtaggcaatacagctataagcttttgatttttatttattttagtagttaggaaagttttctgcaagcgtaacttgacttttatgcagcaaaaaaaaaaaaaaagtgtgtgtgtttgtgtgtgtgtgtgtgtgtgtgtgtgtgtgtgtataaagttatgtgtgtcagatctcccattggcttaagggattctttgccatttaaaaatttcagcttaatttgaaagaagttatacccataatgtgtagtttgctttgattaaaataattttatgtaatcactgtaagaaaattaagcctgtgattggtatttaaaaagtgtattttaaacgatacattctctttgtctcggtacagtagatgggtcctgtattttcagcagaacttagttactaaacttgtataaggataccttttcagacaatcccatagaagtaaaaattatttggtaatatgtatttaacctacaaaataatttatttgaaagcattttgtaaaactgcaaagcgtaaagcaaacgtaacatagtatatacatataatatattgaagagcactgctgtttttgtaaaagcattatttctttcatgatgtaagacattttcatatagctgtttcatacagtctcacaatggctaccttaaactataaaaacactttttaaagatttaaaaaaagaacacattaaaaaaaatctaacaaatatctaagaaataaaattatccctggtcatttcccagttctgagacctactccatcaaaacagggaaaaggaaggagaggatgccttcattgcatggttctttttttttttaatgctggttttatgaatttatagacaccccaggtttaacaagcctttattgaacacatcctttacatcaagcattaagctattttaaggggacagacttgacaaaggggatgtgggtatggaatgggagtgtccaggaagtctcgagtccacattttttctccagtcaagtctcaatgttgacactgagccaggggccagggtgcaaaggggagaggttcacatgtgcagggatgtgttgctttgtatggttcttagtaataaaggacaatagttggagatgttattgtttaaatattaagagcaaattaaggcatataattctatctttttttgggtagagaagtctgtttcaaacatggcaccaataggaaaaaagagtgatagttttgattgttatgacaaaacccttacaagcccatttcaaagagaaaatacttgaacatatatgaaagaaggttaacactgcaaacagacccagaaagagaatactttgatgataatattggcaaagggacataagcagacaattaaaagaagaaatacaggtccgtcaggctgctacattaatttcctatggctgctataacagattaaaacttggtgttttcacataatacaggtttattttcttacagttctggaggtcagatgtctgaagtgggtttcactaggtcaaaaccaaggtgtcccatggccgtgctcccttgagaggctctagaggagaatccatttccttgccttttccagtatctagagctacattccttgcattctttggctcttggccacatcctgcatcttcaaagccagcagcatagcatcttcaaatcactctccttccatggtcccaccaccttctgtttttttgtgtctctctacctccctcttgtaaggaaatttgtgattgcctttagggcccactcaaataacccacaataatgactctgttcaggatccctaatatctataaagtctcttttgtcatataaggtaccattcataggtattaaggcctggataaccttgggtgccattattcagactaccacacctatcaaatagcatgtggggtggaacgatacacatatgtttatctgtgtatgtatgcatgaagcctgtgcaaggacatacatatggtatgtttgggattatttcagtgtgttgagattacagggtatttataattttcgaaaagttccttttatataactgttttgcattgtcagaatttttatggaatgtattttattagtgatcagaaaaagctaagaaactcttggaaagatgattttttaatagacagttttgtaagaacaattttagatttacagaaaactagaaaatgtagtagagttcccacagacccttatacctagttccccctacgattagtatcttacattagtatcgtacatttgttacagtttatgaaccattttggatacacatcactaactaaagtccatactttgttcagatttccttaggtttcacctaatatcctttttttttttgagatggagtttcactcttgttgcccacgctggagtgccatagcgccatcttggctcactgcaacctgtgcctcccaggttcaagccattctcctgcctcagcctcccaagtagctgggattacaggcataagccaccacggccggctaattttttgtatttttagtagagatggggtttcaccgtgttagccaggatggtcttgatctcctgacctcatgatccgcccgtctcggcctcccaaagtgctgggattacaggcgtgagccactgcgcccggcccaccttttgtaatttcttaaaggatatgttgtaattgattaaatacttaagatctgtacacattacatcaattattctcttacatgttacatattatccacaaaaatgtagttggaagctggacttaattaattttgaaaggaaaaaagaaaaattagatgagagatatttatattgatggaaaaatgaaggtgtgaaatgtactttactaataattttgcatttgggcttgcagttctcttttccttccttgaaaaagcctgaacttcacaacaccaggtcttttcatgtttctaaagaatctatagttttcttttgtagtacagcgcacatgatatttgctgtcgtttggtgaatatctggctccccaactggactgagagctccaggggagcagggaccttgtgggctctgctccctgctatatcccctgtgcctggtgcatagtaggcatacagatacaaatggactgtcattgcatatgctcttttgaacttttagaaatatgagtggttaactatagggtacatttttgggtaaataatcataacaattctgtgtgaaaagggtaatttaaaatagtagtatcaaaaatacatttagctgtcttgtcccctccatatatactacatatatatatatatatatatatatatatatatatatgtatatgtatgtgtgtgtgtgtgtgtgtgtgtatgcgcgtatatatatagagaggaagaaaactagaagtatattattgcaaaacattaagagtggttatctctgggttatgagattatggctggctttaattttttttgagatggagttttgctcttgttgcccaggctggagtgcaatggcgctactcagctcaccgcaacctgcacctacccagttcaagtgattctcctgcctcagcctccctagtagctgggattacaggcatgcgccaccacgcctggctaattttatatttttagaggagacggggtttctccatgttggtcaggctggtctcgagttcccaacctcaggtgatccacccaccttggcctcccagagtgctgggattacaggctgtctttaattttcttctttgttttttagctctttccaaggaatttactattttataatttggaaataccacaatattttacctggtattactttttgtttttttgagatggagtctcgctctgtcatccagggcagagtgcagtggcgcaatcttggctcactgcaacctccacctcccgggttcaagcgattcttctgcctcagcctcccgagtagctgggactacaggcgtgagccaccacacccagctaatttttgtatttttagtagagatggggtttcagcatattggccaggctggtgtggaactcctgaccttgtgatctgcccccctcagcctccctaagtgctgggattacaggcatgagccactgcgcctagccctggtattacttttataattagaaaaattagtgagtcctatactaaaaacgtttcaattctagcatgtgcaagagcccttgaggcaagataagaaatttgtgaagtcaacgaccaccttattccccaggagagcttttatctatttaaaccaaaaaagtatagctgaactttagaactatgttctatcttagggtctttgaactagtatttcctatgcctactatcttctagtttcatcaaaaccacttcaaatattgttgatcaattatcaatttaaaagtggagttttccaactatcttggtatgactgtcatgtcatatatgtgtttaattccctttgctaatttaacttttgtgcattaatctaaaaacttaggggaaaagttgattttctcttatttagtatttttttaaagtccatgatataaaatctgcgtctcagtcggcaataacagcctacatttttccttaagacaaaagggatcattcttttttttttttcttaattgtccctttttagataggacatgaatccctggattaggtgaaaaatcatgaaaatattctgtggtttttataaatccaggccatttgtatgttccttgcctgtttctctagataattaaacagtgatggattagaattaggctgcagcagagattgggggaaaaaaaatctcccggcatcccttcctgcagaagcatccgctacagcagtgagtgtagctgccactttaactgacatgtcttaaattctgccctggaaagccctgggatgctgtcagctgcctcggcaactactttgcttgtgcctgagaattgagagtctcactggagaccaaggaataaaatagaaattgaggatttttgttggctctaaaattgaggtttgtctcttcttttagttggcttaaaaaaaaatctggtagaagagagggaaagacatcttcatagtgggactatattcattcctccaaagttacagctgctctaaatctgtgagtatgtcatatttatttagcagttcctgggtttatgattcaaatgttctctttaaatctatgagggtttaatttaaggaaggctatgtaaattttttaaactccagttaaatttcactggaacctgcagtttttgttagatgacattgtcttcattaagagcttcatgtcaagcctgcttggcttcccctctgaccctccccccaacctttttaaaacttcctaaggtgagtgctgaaattgaagaaaatagtgtgacttgctgcggaggaggatctggtcttcccgggatgccatggctggtttattgctgctgcaaggtgtgcgtctgggcggctgagactcctgctgcagaacaatggcaggatgatgctggttcactttgtatttactgtttgtcttatgtcctctgctggtttcattatagcattttgttttgttttgttagggtaattagaaccttagagattagtaaagtggcttgtcctcagaaatagcatgtgttgattgtcctagactctcacctctgaccttgctgtgctggctttagtggtctctttgtagcagattacagtaaatgtgagctaccaaaaagtgacctttgtatggccaccttttaaaattgtgcatcagaatcaatgctgggtattttttttgtgtgtgtgacgcagaccctggagtctaaacatctgtccttagtcatcgtgtcccattttccccctttggaatttcctggacgttagaattgtatccttgctgaattagtgagtgagttttgagcattctctaaagataagttaatttttgattctcaccataacccccatatgttcctgatttgtctttgttgaataaaagtcatattattgaacagattcatataatttggctactgattttgttcctttatcttaaaattacattagctgaaatgatttttaaaagttgatatgttcagagatcagtagtcaaaatacttttaaacaccaactggtaacagtcatcgttgtagatgcagaatatgtttgacttaggctgacatattataggagctttttgggtgccagtattttggttgacttcctgcagggtaaaataaatcaaggatttaaaaaaagaaattttctctaccacccagagatcaaacatctgctgtttttatttttaaacattttgtcatacctaaatgcagcaactttgaatttaattaggaaggattgctaaaattaggaaattctgccttacttaaacttgcaaagatcttatattcgttcattcatttcattcattcattcattcattcattcattcaaaaatgtttacatctgttacgaagctcttgccaggctctggggatatgatgctgaacaaaatattgtatcttccctcatggagcagatatttttagcagatgaagagggcattaaaaaactgattacctaatttcattaaaattgtggtaatttttcacctgtagaagtgtaagtactttgtggccaaacatataggacatataaatacctgcaactaattctgccccagatctgaaggtacagatccctagaatgcttaagctggaaagagatgttggaaatgagttaactggttcagcaagcatgtggtcagtgctatagtaagtgctgagtttaggtcagtaagtgagaaatggttctgctttggaggagctcatagtcttagtggaagaggaagggaaattggctatgttagaatgttctgtcatcaatttcccattttactggagaagaaacaacctagattatttttaaaatgtcttatgtgccaggcccagtatctatggtaaatctgtttttggcttttaaaaaaaatcttcaacagcaaccatgttgattgaccttaatgctcccattttccaaatgaggaaaacgaggtgcacaaagactaactcagttgcctagggtcactcagaatcctgattgtaactccatcatgctaaaagttggcaactctgtgctccttgaagctgctggattatgtcccttagtcataggttggttgggggagccccctcgttttttttttttcctttttcttcttcttttttctcctaaagccacagtgcactcctaaatatcatgctattatgaaacaggaaaatgcatagtttttttttgcctcatgcccagaggtcttcctaacattttgtacttgctttccacctgttaacagcacatatacatttatgtctttggttcactttagaaaggacaggattgcacttatgggcagattatgcttcagtggcaggccagttaaggaacgtggaaaacatgcaccctagaagaggaatgctaatggaaaaatcaagggtttcttgaattttaggtccagaatgctgttcaccaacatcagcaattccctatagggccgccatgttcagagttgtacacaggacttgtctcctgtaatgagttggaattcttgcaaatttgaaaattgagggtagggagtaacttttcaggagagatattatagcacatcttgattctaaaggccatttgtccatttcctttctgaatgactgttagaatgttcttccttagaatgaagtcttccttatcgaagatgaactttacctctctacagcctcctacccactgatcttaagataaaaccactctagtgtttttacaaagtagtctttcaaatatgtaaaatattctccctaccagtccctggtggatcttcgtatatccaagctacacatcctcagttatgtcacttctctctcctgtgacatatttcatgcttctctccattctgatctctttgaatttgacctgtcatagtttctagatggttacaaccaaaactggacactatttctagttttgtctggtcagccaagagtgcaaatgggtcatttgtttctcatgatgcagtaatgttattcttctgttaatgtttcctatgctgcatatcaatagctgtgtaacaaatcaccacagagcttagtagacttaaaacaataacaatcatttatttgcttatgaatctgaagtttatgcaggtctcagaggaaatgactcatctctgcccacttggaatcacctggggtggctcagctggagctggaggagccattgctatgatggctcacttacctggctggccagttagtattggttgtcagctgggaatttagctagaactgttgtcaggggctttgttcttctccatgttgttgcttgagcttcctcacagcatagcaatgtggttctgagctttagtattccaaatgacaagaagtagcaactgctagtctttaagatttggaccccaaactaacacagtgttgtattggtcaagtagtcacagagaccaccttgattcaagaagtggggccatagacctcacttcttgacaggaagggtgacaaagaatttgtggccgtttataatctaccacacttgccaaatttttggtctctgtccttctctctatttccagctgagtcatacaccttaaactcctcaactaaaaccccaagagttagatttgaatttttgttaaggtgagtctcctcaccttaatgagatacccctctgcagactaacatcaagacattaaccaaaatgttatgtgactctggtgatttatttatttatttattttttgagatggagtttcctgtcactctggttgcccaggctggagtgcaatggcgtgatctcggctcaccacaacctctgcctcccaggttcaagcaattctcctgcctcagactccctagtagccgggattacaggcatgtgccaccacgcccagctaattttgtatttttattagacacagggtttctccatgttggtcaggctggtctcgaactcctgacctcaggtgatctgcccgcctgggcctcccaaagtgctaggattacaggtgtgagccaccacgcccggcctggtgatttatttgggtaagaaatgacttaacagtgccattctacccaagttctctgacttagccagagaaatttaggtggtaattgcagaagagcaaacagaacatgagtttgatgtgaatttcatgcatggtttacttttcttttgatgtttcgtcagtctacagatgtggaaagtctttagtgaccaagtggtatggatggatttcttcggtgatcattttagattaatgggttatagaatattttattttgagttattataggtggctgtaatttagaaagcaggaaagtatgaaaccaagacttgaatttctcttgtggtttggggctgtagtcattgttttcttagttagtagttgtgacagaatttgagcccttcattccagcaatccaggacccaatatatagcgtttatttgccatcacccctccttaatattagcttaggtgtttttgtttttattttttaaagtaatagcatccctgtatagcaaaaccatttcatatgcctgcttgataccacaggctgaataaatacagcacattaactatggaaacagccacatattgaagaactaaagaaaaactctagagtttaattactcgaatatttatatgctccttcttcagttttgtttgtttttcctactaatagatatttgtagggagagcccttatatctactgaaagctgcttgtttgtgaatgaaggtttctgtgatgaaatattcatgggtacttttcatgatctacatatgtgacataaaatgccaagtaggaagactgaatttgatgcaaggggctaattgcatcaggaagaatgtcattcattcatcaagcagtcattgaacatctctggattaagaaacagatagttcctgttcttaagaagctcataagctactcactgtaattgaaaagtagaccaataattatactatgagttgtaaactccaaccagagaacccagagaagaaacatactatctagcctgagaaaatgactttttggaagcctttattttttttcttcctccatggatcatgaggcaaataaaaggaaaacttgttgtcagaattgtctttagaaaaactttgttactctttgttttaggtggtgatattttaaaagaaaagacaatgtcccccccattcagtgtcccactgaaaacctgtatttgctctacatctgaaaatatctgcattccaacgtggagcgatgcaatgcaaatggcaaatgctgcctcagtggcctctgccccatgactgcaggaagcattaagcagaactgctgaatagcaggaatataatggtctgtctaatgggaagttcttggctcccataactcctctaataacatcagcaccactatactcctctataactcctctaataacatcagcaccacttcattcccttgcatttatgtgatgtttcagtttaaaaagcgattttacaaaatggagcacgttctttcctcgtggtatctctgggagggacatagggcaggtgttgttattgctgctttgcttttgcagatagggacactgagacccactgaggtgaggaagtggcgcaaagccacactgcccgccagtgactggcgtacctaggacaggaacacagtggtctgctatgtgtcccagcatgccttctcctaaatcacgctccagtcatgtggtaagagaggataattcatagattaggtaagaagttttcagtcagaaataagagaaccctccaatagggaaaggatttttgtttgtttttaatttaaaaaatcagcaaagaaaactagcaaaatgaaacaggagctgtgcctatctcttgccaatccaacattccattgttgtttgttttaaataatgtgaaggagtctgatttgcttgcctaaggaaagaatttgaaaagatacaggctctggttctaagtttccaacttggtcagtaatttgctatgactatgggcaaggaaaacagcagctgttggagtagtttcttttgctgaaagagatagtaagcactaccttccattttctttctaaaatttttttttaaatgaaaagaaaatgtttttagagactccagcctgggcgacagcctgtgcacttcacagtgctgcccactgcagctttgaactcctgggcttaggctgtcctctcagcctcctgagtagctaagactgcaggtgtatgccactacatacgtccaattttttatttttttgtagagatgggctattgctatgttgcccaggctagtctagaagttctgggctcaagtgatcctcctgcctcagcctcccaaaacactgggattacaggtgtgaggcactgtacccagcctgctttccattttcttagtgagtagcgtctttgacatgaagttaaagccaggtactatgagtgctcacctgatttttggttcttacgaaagtgctttttttctgtagacagttgttaaattggtttccttgcaggggcgatgaccagtggagccttatattctgccatcttgctctgccccttaatgagtagggtctgaatcatgctttgtattgtatatgaaaatgtacttgtattcttttcaactgttctcctttactctggaactttcatccccattgaggacagaaaagcacattaagtggtcaattaaaaattacatcatctgttcaaatttccagcagtctgttttggagtgactcaggttttctgggagatgtgggaggggtaaatgcccagttaagtaaaaacttaaactctgtatcaggcttatatcttccttcttaaaaggttttccctctctctcctccttctgacatggcgttgggtgcaggaagaggtggtgtacagatggcccctgtctggggactgctgcctggtagagggccccatcctgttgtctttgcattggcctctctccttgctgcctctgccaccaaaggatttctggactgttggtgtgcctgtggcccaagggcttggcattctccactggcattggttggcccacaggttcctgagatccagcggccactcacatttaatcgctgtctctgccctttgttacagaatcatcatgccaataagcagtcttttaaaaaaacatttttattttatgataattccaaacttacagaaaaagtgcaagaataacacagagaacttctgaatgcccttaattcagttttaacattttgccatatttgttttattattctatgtatatacattattaggtattttctgagtcatttgagaataggattttgctccagagaaggtggtctagaaggatgaaccaaaatctttctagtgaatggagctttcatattcctttcttttctctgctttcttccaattcttctttctttctttctttctttttgagatagggtcttgctctgtcacccaggttggagtgtagtgacatgatcacagctcactgcagcctcaaccgtcctgtttcaagcgatcctcccgcttcagccgcctgagtagctgggactacaggtatgcaccaccaggcctggctgatttttcgtattttttgtagagatggggtctccctatgttgcccaggctggtctcaaactcctggactcaagtgatccgcctgccttggccttgcaaaatgctgggattacaggcatgagccactgtgcccagcctgcatttcccgttgttgatattcttaaaagtgtatgtctagaccatcagataggccaggtgtgactggtctgactagaggagaatgatgttatccttcatttgctcctttgtttatttatttaatcaaccagcacagtggtattgaagatcattacctgcaagacactgtactaggtgctgcgatacaatcctgcctttatgaagtttgtactctgattaagagataattatatttttaagtcagagttaattaggctgcttgcggtggctcatgcctgtaatcccagcactttgggaggtcgaggcaggtggatcaactgaggtcaggagtttgagaccagcgtgaccaatatgatgaaactccgtttctactaaaaatacaaaaattagccaggtgtggtggtggcatgtgcctgtagtcccagctattcaggaggctgagacaggagaattgcttgaacccaggaggcagagattgcagtgagctgagatcccactactgcactccagcctgggtgacagaactagactctgtctcaaaaaaaaaaaaaaaaaagagttaattaaaagaaacttacgaaagattactattttcctcattctagatgctatagttttcttaatacagcttaagttgtatcaggattcatattctgttgtgttcacaaattcatttaaaataattcacaactttttacaatgtttttaagtcacatctcttttatcctgtttttattcagttagattttataaattataaattcaggaatttataatttattctcactcaggtatcatctttgagagcaggcatgctattattttttgtgctttaacatctgataccatgcctggaatatggcattcctaaatgtttatggataaaaattaaattttagtttactaaatataagtcatccacttagagcattatctttttaaattatggttcattcactgctatcttttccagtttcattgttttgcagagtttttttttttttaaccttgcattctctattttaatcccagtttctgatacaaatgtaaaacacatgataaagggaagtacctcttgagagaagctgttcaaacagttatgaatccatctatttgaatgagcttgtcattccccattttccatacagagctaagggacacttggcaaatatcacattcacatgggcctcatgtgctacatttttctcatctgccaaagatgggaaacacggctggtattagagaactcgtgagagcgccatctcttagcttcctatgagggctgattccttcaataaggcatgaatcattgttcgtttttagcaaaggtagatgcatgaaggaccagattgagatggtaaatatgcataaagtaataagtttgaaagcagttcaggaatataatagtagacctattgaagcatgttatcaatgcaggaaatagaaaagataaaattagaaaaaccacattcaagaactgacttttttaaagtagtgaaaggttggaagacttctaaaaggtctaaaataacatgagaaacacattgagtagtgatgtattctgacttcttcatgtggagagggccaaaaataataaattatactgttcttgcatatttcttagataactattttgagttatgtgtgataaaaagggatgatcagagggtgtttccttaaattaatatttgaatattcccttcatgaatatagacttaaattactcaaaatatatgcttaacttttttcattattgttaaaatggtacattatcatttttgaaaaaattgaaaaaaaaacattgaaaagtacaaagaatctaaagattacccacgccctacaaataatactaagggttacagttttgattgaggaaggctttgtaagaagtctaagcatagattatttagggagaagtttatctagtttatctattcgccagtttctcgtttaatagaacagttatatcctttgttggtgcttgccctttggcctttttcagctgtttttccttcgtgaggaacagggccagagtggagagaaaaagttgaaagtatattcctttgattctgaatgcactggtgacaggcctggcaaaatgggattggagttggcagtaaaatgatacttggggagtatctttttatttttgggctcttcttgctttctcattgtcagcagcagcacctcctccttcctctgatcatcggccatgagaacagctctttgaggaatcatccttgggcagaatttggtctgggaagcagttttttttagtaagaaagacaaatgttgtctatgtagctaatactattaagcaatagatttccagtggtgtgtcagagtcctgcatttcataattctagtggataccattttttatttttaaagttttagatttgaaggtacatgtgcatgtctgttacatgggtatattgcataatggtggggattgagcttctagtgtactcatcacgcaaatattgaacattgtatctaaaaggtaatttttcaaccttcacctccatcctccctcccctcttttggagtaccaagtgtctgttatttccatctttatttgcatttgtacctattgtttagctttcagaagtgagaacccatggtatttgattttctgcttctgacttatttcatctaggataatggcttctagccattcaagttgccgcaaagatgatttcattcctttttgtggctacatagtattccattctgtatctattccacattttctttatccagtcaaccattgatggacacctaggttggttctatgactttgctattgtgaatagtactgtgataaacatatgagtgcaggaatcttttttatataatgatttcttttcctttgggtagataccaggcagtgggattgctgtctcaaatggtagcactatttttagctccttgagatatcttcatactgttttccatagaggttgaagcaacgtttgttcccaccaacagtgtacaagtgttcccttttctccataagcaatccaacatctgttgttttttgattttttaataatagccattctgactggtataagatgatatctcattgtggttttaatttgtgtttctctgatgattagtgatgttgagcattttttttttcatgtgtttgttggcctcttgtattattttatttaagaaatatctgttcaggccttttgcccagtttttaatggtgttgtttctttcttgttgagttgtttgagttccttgtagattctggatgttagtcttttgtcagaggcatagtctgcaaatactttcttatttttgagacagggtctcactctgtcacctgggctgagtgcagtggtgcgatcttggctcactgcaacctatgcctcccagactcaagtgatccttccacttaagcctccttagttgctaggactacaggcatgtgataccacgcccagataattttcatattttttgtagagacagggttttgtcgtgttgcccaggctggtcttaaacttctgagctcaagtgatcagcccgtctcagcctccaaaagtgctgggattacaggcatgaggcaccacacccagccaatatggtcattttaatgatactgattcttccagtccgtgtgcatgggatgttttttccatttgtttgtatgatctgtgatttctttcatcagtgttttgttgttcttcttgtagagatcttttacctccttggttaaatgtattccaaggatttttgttgtggctaacataaatgggattcagttcttgatttggttctcagcttgaacataattggtatatagaaatgctactgatttttgtacgttgattttgtatctttactgaagttgtttatcaaatctaggagtcttttggaggagtcttcggggttttctgtctttttgggaggagtctttggggctttctaggtatatgattatgtcatcaattaacaaagataatttgacttccttttttccaatttggatgccttttatatctttctcttgcctgatttctttggctcggacttccagtattatgttgaataagagtggtgaaagtgggtgtcctcatttgtttcagtccttaggggaaatgtttcaacttttcccaattccatatgatgttggctgtgggtttgtcatatatggctcttattattttgaggtatgtttctttgatgcctggtttgttgaaggtttttatcaggaaggcatgttggattttatcagttgttttttctgtgtctattgagataatcatacggtttttgtttttagtttattgatttgcatatgttgaaccatccttgcatacctggaataaagctcacttgattgtgatgaattatatttttgatgtgtgttggattcagtttgctagtattttgtggaggatttttgcatctgtgttcctcagggatattggttggtagttttctctttttgttgtgtccttgtctgattttagtatcagggtgatcctggattcacagaaggtgttattgcacctcctcaaattttttgtaatagtttcactaagattggtagtagcttgtctttatatgtctggtaaaatttggctgtgaatgcatctggtcctgagctgcttttttttttttttccagaagattttttattactagtttaatttcattacttacttattattggtctgcttgggatttctttttctttctgtttcaatcttgggagtttgtatgttttcaggaatttatccatttcctctaggttttctagtttgtgtgcataaatgagttcataggagtctcttatgatcatttgtatttctgtggtattggttgtaatatcacctttatcatttttgattatgcttatttgaatcttctcttttattttcttggttagtctagctaatggtctgccaattggtttatccttttgaagaaccgacttttcggttcatttattcttttcttttttgagatggagtcttgctttgttgctcaggctagaatacagtggcatgatcttggctcactgcaacctccgcctcccgggttcaagtaattctcctgcctcagcctcccaagtagctggggctacaggcatgcaccactatgccctgctaatttttgtatttttaatggagatgacgtttcgccatgttgggcaggctggtctcaaactcctgacatcaggtgatccatccgcctgggcctcccaaagtgctgggattacaggcatgagccactgtgcccagccagtttattgagtccttgcctttttttttttgtctcaatctcatttagttttgttctgatctttgttatttcttttcttctgctagctttgggttggtttgttcttgtttttctagttccttgagttgtgatgttaggttgttaatttgaggtctttctgtctttctgatgtaggcgtttaattaatgctataaactttccgcttagcactgcttttgctgtgtaccagaggttttagtatgttgtgtctttgttttcattcatttaaaagaatttttttatttctgccttaatttcattgtttacccaagagttgttcaggagcaagttgtttaggttccatgtacttgtatagttttgagagttcttcttgggattgatttctaatttcatcccactctggtatgagaaaatacttgatatgattttcatttatttgattttattgagacttgctttgtggctgagtatatggttgattctggagaatgttccatgcacaaatgaaaagaatatatattctgtggttgttcagtagaatgttctataaatgtcttttaggtccatttggtctgtaacccagttaagtcccaagtttctttgttgattttctgcctcgatgatctgtctagtgatgtcagtggaggtgttgaagtccctcactataattgtattgatatcagtctattctcttaggtctagtagcatttgtttgataaatctgggtgccccagtattggttgcatgtatatttagaatagttaaatcttcttgttatattgaatcctttatcattatacataatgtccttctttgtctttttttactgttagttggtttatgtctgttttacttgatatgagaatagtcactcctgctcacttttgttttccattctcattttatgtcttctttctcccttttactttgagtcgaaaggtatctttagccagtaggtgggtcacttgtaggcagcagatggttgggtcttgtattttttttaaaaaactagtttgctactccgtatcttttaagtggggcatttaggtcatttacatttaggttagtattgatatgtgaggttttattcctgtcatagtgttgttagctagttgttttggagtttcaattgtgtagttgttttataagatctgtgagctttgcacttacgtgttcttttatgatggtgagtattgtcctttcatttccatgtttagaattcccttcagcatttcttgtaggataggtcttgtggtgacagatgcccttagtatttgcttgtctagaaaatattttatttcttcttcattgatgaagcttagtttggcaggatgtgaaattcttggctggcatttttttttctttaaggatgctaaaaatagaccccaatctcttctggtttgtagggtttctgctgagaagtttgctgttagtctgatgggttttcctttgtaggtgatttgacccttctttctagttgcctttaaaattttttctttagtgttgaccttggatagtctgatgactatatgccttggtgaagttcgtcttgcatagtgtcttgcaggtgttctctgaatgtcttgtatctgtatgttcacctctgtagaaagattagggagtttcctgaattattccctcaaatatattttccaggttgcttactttttcttcttccttctcaggaatgcctataagccataggtttggttgctttgcacaatcctgtatgtctgaaatgctttgttcatttttaaaaattcttttttctttatttttgtttgggttaatttgaaagatgggtcttcaagctattttttaaaaaattattagttggtgatatgaattggaggtctttaagctctgaaatactttcttctgcctggtccagtctattgttaaaactttcaactgtattttgaaatttcttaagtgaatttttcatttccagaagttctgttttttgttttgttttgttttgtttttgttttatttatttatttatttattgatcattcttgggtgtttctcacagagggggatttggcagggtcataggacaatagtggagggaaggtcagcagataaacaagtgaacaaaggtctctggttttcctaggcagaggaccctgcggccttccgcagtgtttgtgtccctgggtacttaagattagggagtggtaatgactcttaaggagcatgctgccttcaagcatctgtttaagaaagcacatcttgcaccgcccttaatccatttaaccctgagtggacacagcacatgtttcagagagcacagggttgggggtaaggtcacagatcaacaggatcccaaggcagaagaatttttcttagtacagaacaaaatgaaaagtctcccatgtctacttctccctacacagacacggcaaccatccgatttctcaatcttttccccacctttcccctctttctattccgcaaaaccgccattgtcatcatggcccgttctcaatgagctgttgggtacacctcccagacggggtggtggccaggcagaggggctcctcacttcccagcaggggcggccgggcagaggcgcccctcacctcccagacggggcggctggccgggcggggggctgacccccccacctccctcctggatggggcagctggccgggcggggggctgacccccccacctccctgccagatggggcggctggctgggcggggggctgaccccccgacttccctcccggatggggcggctggcctggcgggggctgacccccacctccctcccggacggggtggctgccgggcagagacgctcctcacttcccagacggggtggctgccggatggaggggctcctcacttctcagatggggcggctgccgggcagagggactcctcacttctcagacggggcggccgggcagagacactcctcacctcccagatggggtcgcggccgggcagaggcgctcctcacatcccagacggggcggcgggtcagaggcgctcctcacatcccagacggggcagcggggcagaggcgctccccacatctcagacgatgggcggcggggcagagacgctcctcacttcctagatgggatggcggcggggaagaggcgctcctcacttcctagatgggatggcagccaggcagagacgctcctcactttccagactgggcagccaggcagaggggctcctcacatcccagaggatgggcggccaggcagagacgctcctcacttcccagacggggtggcggccgggcagaggctgcaatctcggctctttgggaggccaaggcaggcggctgggaggtggatgttgtagcgagccgagatcacgccactgcactccagcctgggcaccattgagcactgagcgaacgagactccgtctgcaatcccggcacctcgggaggccgaggctggcggatcactggcggttaggagctggagaccagcccggccaacacagcgaaaccccgtctccaccaaaaaaatacgaaaaccagtcaggcgtggcggcgtgcgcctgcaatcgcaggcactgggcaggctgaggcaggagaatcaggcagggaggttgcagtgagcccagatggcagcagtacagtccagcttcggctcggcatcagagggagaccgtggaaagagagggagagggagaccgtggggagagagagggagagggagagggagagggcgaggttttcttctcccttctccttgtcgccgtgtgttccggtgtcatggcaccggccaggtggaaaccacatctgcggatcattgggaatgttggccatgcttctcgaaccagttttctctcacggaggacctagccgtcgcgtggggctagaaaaggtcctgaagcaactgaagatttctcgccagggctacaccctggtgttatctgaaggcttctggactgaccccgcctccaactgcccggctgggtgtccgcaacaggatctacagctgtcctatcgcaaaatttcctctttccctatccacaaatgccatgtctcctatcctctctgtgtatgcagtgtttgagaatttttatagttcagggaaagagtccccagagtgttcgaaccgtgcctgagcggccgccgtcgtctcccggcaccactggccctgcagcagccagttgagaagggcggaggctgattccaatgaagtggcagaacgttaggcggcctctccaaaaagccagctacgtcgccgttagccaaggtttgagggtcttctccttctcttcgagggcccaacctcccctccagatttagtacaccagaggcgtcgcagcaacggctgctgcctgcgcgcctcagctaggcgggctctgtttttgttttttaaaggatattagtctcttccctcatttcttggattactttcttggtttcattgtgttgagttttcaaccttttcttggatctcattgagcttgcttgcagtccatactctgaattatttatctgccgtttctgagtttttatttggttaaggtctgttgctagacagctagtgtgaccctttggtgatgtcacaacatttagatttttcatggtgccagaatttttatgttggtttcttctcatctagagaggctactgctttttctttttgaatttattttcatttagatgggcgtcccccccacctcccgtttccacctcttctaggggtgtaactatagcgttagtatgttgggtagggtcttttgggttcgcttctaaggccctgcgcgattctgtctgcaggttttatattggtctgtgcagtttgacctggaggtcagtaggtggcgcctatgggtaagagccatttgccgcacaagcagatgggtatatacttgatttttatttactgtgatgagacctctgttgtttcaggtgatgagctggacagaggagtgcctggtgccttgaggttcttgttcaggttggggaggggggacatagctgggcagaactggattccctagcttgcccatgagtatcacagtgacgagctcaagctccagccctggtgggggtgactcgggggagctcctggtgagatgtgccaaggtctctgcaggatttgagagggctccactggcttgatggataccatttcgactctagattacaaacatggtggcttccagagcacatcagttggcctatctacactcattccttttctcccctaaggagagattttaacgttgatggaaaaccttgaaggacatatttttattcatttttgaaattttattttagttttaaatatggactagcttttatctcattgcgcaggaacataacatattgtgttggatttattggggaagttaaatttgaattggctctgctatctatgatttgattgagagaaaaagtataaacaaagatagctgtaagctttaccctcgaaaatagttgtacctagtgattaaaattagagcagtattcaaatgaataataaaaagataagtaactcaattaaaaatgggaaaataatctgaatagacattactccaaagaagacatacaattggccattaagtacttaaaaaagattctcaacattattagtcattaagcaaatgcacaccaaaaactacagtgagataccaccatatctcatggacaaaaacaagtattggccaagctgttaagaaattgggaatctagtacattattggtgggaatataaaatcacatagctggccgggcatggtggctcatgctggtaatccaagcactctgggaggctggggtaggaggattgcttgagcctaggagttcaagaccagcctgggcaagatggcaaggcaccatttctacaaaaaataaaaattaaaaaaatcggaaaaatcacacagccactttggaaaacagtctagtagttcttcaaaatgtcaaacataaagttaccacataatgtagcaattccacataccataatttagcattccatagcaatgctagatatataattaagagaaatgaaaatacatgtccacacaataacttgtttgtttttttttttttctgagatggagtctcactctgtcacccaggctggagtgcagtggcacaatcttggctcactgcaacctccgcctcccgggttcaagcaattctcctgcctcagcctcccgagtagctggaattacgggtgtgcaccaccatgcctggctaatttttgtatttttagtagagatggagttttgccatgttggccaggctggtcttgaactcctgacctcaagtgatctgccctcctcggcctcccaaagtcctgctgggattacaggagtgagccaccatgccttggccaagaacttgtacatgaatgttcataacagcattattcgtaatggccacaaaatgcaaattattcatatattatcaacaaatgactaacaaaatgtggtatagctatacaatggaataatattaggtaataaaaaggaataaagtactgttacatgataccacatgaatgaatcttgaaaacatgctaactgaaaaagccaagcataaagaccatactttttatgattccattgatatgaaatgtccagaataggcaaatctatagacacaaaaagtagattagtggttgtttaggactagaggaggtggagtggagaatgaggagtgactgctaatatatggatacattttggtgacaaaatattataaaattagattgtggtgatagtctgtgaatatactaaaaaccattgattgtaaacattaattgggtgaattttatggtctgtgaattaggtctgaataaagctgtttaaaaacttaaaagttagagccgttaaaatagggcaaaataagggcatatattccaatgtactaatagctgtaattgaagtttggtgtgttatttttcgtagcctccagtataaagatttagcatggctcttttgcaagggtacatgcatatcagtgcagtgttcagatattaaaagcctttattgaaggaaataagagaagacctgaataaatgtgtaaagatgtgaagatgcaatgttataaagacaacaattctctgtagatttcctaataatgtaatgaattcccagtcaaaactccagcaggacttgcttgtaatattataatgactaactctgaaattcataaacaagaatgtaggtgtaataataacaaccccacaaaaagagtgtttaataaagtagagaacttgccccagttggcttacaggtctcggaaagccatgataataaaaacggtgtgactagtgcagagagaggcaaatatgtgatggaacaaaagaatgcccagaaacagacctgagcacgtatggaaaattgctgtgtgtaagagattgcagaataatccagtatgtcaaagtatcataattatggaatcaacgcatgtcagtgaggaaatcagcaagatggtaaacctggtaacagcatttggagaactgaggaaagaaaaagtgttgaaataaggtttgttatgcacaacactggttaacctccggcaaggtaataaaaccataatcttaccacacagaaattatttgcatatctaccagattaaaaaatctacaagttaacataattttacagagtataggttttaatagtaaatagcaagccaaacaagatatatactccctagggaattaaatgttccttgggtgggcctgtcagacagtgctccaaggtgaccttgagaggacatgcagtcttccttttgccttgtttccaagctcttataacaagtagatgagttatttcttgcttatccatgcaggaaagaattaaatgtagctcagactgtacacaaaaatggattctagattatatttgtgtgtttgcaatagtattttctctactttatgtatttgaagcatttcttattaatgaaatgagaaaatgcattcttaaaacactagacagtactttcaataaatgggttatgtctatatctaaaaaaatcctgtttaataaaaaaattagtttgtggcatgatatgcttattgtgatattaacataaatctagaaatactgtagaatttccatgaattcgtgtacatgtgtatacaaacataaagaacttgaagaatctgaatctaatcttttatacctcagaaaagatgaataaaatgtaacattattttgttaataattattatattctgctaaagtcaagtctgttgtgccaggtaaagatacaataattttagcttttattaacagattaatttaggcacagtaatattttaactagtttgtttgagcataagtgattcctgaattgaatatcattagaacacaagcagttcagtgttctacttaaggagtgggagggggaaacttatgaagtatttaaagaagcaagacaaataaaatacttgactggaacaagtgggaagttcttagttagaggtgagttggcggtttctgattggctaagcttaagttttgtttttactgtttacggtgagttgagtttccatttgctcgtataggaaccatctttgctgaaggcctcccaattcattattactgtttttattttttgagatggagtgtcactcttgtcacccaggctggaatgcagtggtgcaatcttggctcactgcaacctccgcctcccgggttcaagcaattctcctgtctcagcctcctgagtagctcggattacaggcacccaccaccacgcctggctaatttttgtattttcagtagagacggggtttcaccatgctggccaggctggtctcaaactcctgacctcaagtgatctgcctgcctcagcctcccaaagtgctgggattacaggcatgagccagcgtgcccagtcccaattattttagcactttgaaacatataatatttacctggcacaccaaatttatgtttatatctagtgtgttatatatggcatgtcaaatcattgggggaaaagatgtgtttttttaaaaacaatcttgggaaacatggcaaaagattagggaaaaaattacacagcactatcttgtaccatttatttaaattataaacgattaaatataacatattaaaaagtaaaacacaggtaaaactatgttatataatctttgtagagggaaggtttttctaagtatgccctcaaaatcaggaatgttaaagaaaagggtgatagttacgactaagtaaaaatttcaatattggggagacttttattaaagctaaaggcaaatgtgaaaaggggatattttaacagtacatttcagagactgtgtgtttctagccctcgaaaatgagtctgtaaatgaacagatgggcaagaatggtccaaatgggtagatagccttttcagtcggtcacttcctctttccctgcttgtaaacggagctgatggtcactgcccagagtcttatttatggaagtggtacctgtattctcagaataagaagtttttgtgatggaaataacttgtcttctaatgacattttcccttacctgtggagttttcttccctcccaccacccacacctaaccacccttgtaagaacaacttcagttttcccctatgtgatgtgaaaaatttagggaacttgatatatccaagataaaaatgaatgtctagtgtaaaatattagagtgcattgggaagtctgaacttccaatgggggaaaaaaacaaaaaacaaaactccacttaattgaggacactgcactttttttttttttttgagatggagttttgctcttgtcgcccaggctggagtgcaatggtgcgatcttggctcaccgcaacctccgcctcctgggttcaagcgattctccctgactcagcctcccgggtagctgggattacaggcatgcgccacgatacctggctaatttttgtatttttagtagagacggagtttcaccatgttggccaggctggtctcgaactcctgacctcgggtgatccacctgcctcggcctcccaaagtgctgagattacaggcgtgagccactgcacccattgtacatcttagaattaaaaaacaaaaacaaaaacaaaaaacaaccacaaaaaaacacgcaaaacttctcctctttttttaatgactttacctctttttttaatgactctagctcttctctgtgaaatgtgtactgttaaggtgagtggaaatggaaggagattggcaattctattgtaatacagggcaggacttactcttaaactctttctggaaatttccttctctgagtggacctgcccccattgtgtgcctgtcagatatctgtgggtcaacaaactggccgaagattctgcaaggcaaattggtccttaccttctttatgttacttcagctttctgtggtgtgtatttagtgggaaattagacagtttattaaaaataaagtactttacaaaataagtaccattgccttcgggaatgtattttttggaaataattaggcaagtgagtaaaggggcttattaacagtagtttgtaatgccaaaactttgggagtaacctacatgcctgaaaatgagggacaggtaacaaattatcattatttccagtcagcagcatgttgcagatgctatgataaagcaactctggatttattgagaagaaaagattcagaataattcctatatgtaatccattatactgtataccataacccattataataagtatctttaataaagttttattaaaatatgtatagatttacttgggaaaaaacctggacggatatatacaagatacaatcctatctttgggtggagacctgtggagtaatttcagttaacttattttttgtgtactagaatgaaaaaataaagttattagggctgtatttcaggaatgtttgacacataacagtagatttttgttacttgatttttaaaattgataagaaatggaggtaagatgtataaaaataattggaagacttatgttgtgtaattgcactggtgtagacttttctcacaggacaaagaaataaaaaaccttgctctgcctttttaattaacagatcttctcactcagatatggcaacaagcagccttcactttgcatcatgtgatacacaacaggcgcccagacagcgcggagcgtctactgtcagcaggtcaggaagggttgtgggcattcctgggggaagaggggaggacagtcccacccttgaaggaatataatactgatatttgcatagtgcattgcgtttgacaaaccaatgaggtcaggagaggcctaggcaagtagagtgcccattttataaatcagggaaggagatacggtggctgctcagggactcagtgaataggtggcactgttacatgaaagcaaaacaaaattcaactttggggcacaactccctttcaagtcgcttttatctttaaatatttttagctattatttttattataaaataataaatcacactgccaaacattggggaaaatggaggaaaggagaaacaaccataatgatgatcacttgaacacagaattttggtgtatttccttccagtctttttcctaggcatgtgcttcttgatacagttgtaaccataatagattttttcgtcaaatattatattatgattatttctttcttacattttttgcataatcttggtttaaaaatatattttaagaagtgttcattgtagaaaattcagagctatagaaagcacaaagagaatgaaatatgtattactataatcctgattatttttgtgtgtattctttttctcctcaaatatagagatattaaatttttttcttaattggaatcatattaaatatactgttcagtaatctacttcttaaaatttaatatatcgtgatattttccccttccattagatatttttctgtggtatcatacttggttaatttttgttcctttccagatcattttagaattaacagattctctctttgaacatgaaggttttttttatgagttattaaggcagctctgttaaagctgttctagtacatgagaaagtacttttcatccatccttagaggtttattaaacttttagaattatacagcagatcctttacttagcattttggattttgcatttgaaatttcagctatgcgtgtgttctttatactcatgggtttggtagtttgtcttaggattctaccctcgcaatatatagaaaaggttacagaatggagataaagtgaaaataacttctaaggatcttaaggcatttgttttccatatccttttttttactgtgtgtgtaaaattcctgctcatggaattttgtgttttcttcaaaaagaagtgctcttccttcatagttatcctctaactcattcgatagtttcctaagtaactactgtatcaacatttataatgctgagtttgaaagctctaataaaataaataaaaattactgaaagcattaataaataagggcatgacacgcacaggcagcaacaagctgcatctgtagactggaagtctttagcatgcacgtagttgttgaagtgatgaaccacacctgtatttcccagagagccataacaaaagagaagagaatggaggaaggaaccttttgggaacacagaacattgaagcatggctgagacagtgaccgttcaaacaagagctacatagatgtgtgagagaggaagactacaagttggtggccacaggacaggcaagggacttgggggaagggtgagttctggaatgcagtcagcagagccaggtgtggcaaagaggtcttcatggatacaggtggaaaagtatcctttgcatttcatagttaggtcattggagacctttagctcataaggttttagggaagttgaggcaggagtcaggcagcatggctaaaggtcagtgggaggtggggaagtagggagagtgagcatcatttgttttctgaagctcttgcctgtgaatagaaggagtgggagaagggtgtgttaggagagaaagcaagattgagggagttatctttcttgctagttttactttaaatagaaatgaatgagatttgtgtatatttctgagtcgggaaggagtcaaagagaggaagaggttaaagttatataaaagaggaaatggaggtgaaatataagaaataattgagaagtgttttcatgatagcacagggtgggcatccctaatccaaagatccaaaatactctagtgagcatttttttttttttttgagtgtcatgtgggtgctcaaaaagtttcagattttggagcatttcaattttggattttcagattagggatgctcaacctgtactcacatttgcagttttcatagtctttttctttttaaaaactaaacaacagacattctcactctgccttttaattgataggtcttctaatgcatgtgttgaagaataaacataatgtgaagcagcctaaaatgacacttggcaaagtggaggaagcttggatgtggacaagaagtgtggctcttatggagttagtctgaacagaaaatgatagcgccatacctcatatgttactcctcctggtactcctcattccacaactagctatttgcttcttaacacaaagttgtgaggcagccaaggagagagtttgggtcaccatttaacaagtgagacaccccggatgtcaagtgacatagccaagtgcaacagccaggcagtggtggaattacatcttgatgctccaccttctaatttctgggctggtgcacctttaagaaactcatttgcctccttacttgtaatccctttcacttgtttagtcttacagagtgttttgacaaccatggtttcttgcgattctccctccaaccttgaaagagccaagagagaatcttcccacaaaaggatcctcatatccagagaagtacatgatcagctaaaatgccttgtcactctcaaattcttggaattagaatttcctgccattgtcctaaagggcaccagtgacaaactttaagacatttgacagttttgtgttcatcacttcaaatctgtttacaaactagttgttgaaacaactgtgttaaggtccctggaaaaatgaggaaagactctgcaccctggccagagctttgtcatcactttactttctcctcttaccacatctcttcattagaggtgggagacctgttgttggctcatcaaatatgtatttttccataggaaatgggctgaacacaaggttactcaatttacagtctctaagagaaagtgtgtcttttttatttacttgagaaagtcatcaaaacagaacaggggtctagggccttagaattaaaggaacggagagaaaacctttcatagacttctttgtagttcacttaccaagcctagatatgtcagcccagtgtgggtacagaactttggtagctttagttaccaaatcaaggttggcattgggaaatcccagaattacacagggagttctggctgctccggagactgagttccagagactggtttagtgggatgagttgtccaaatggctcaatcatgaaggttacggcaaaatgttggccaagggcttttgagagaagagggtgactctcccttggattggttagtaaagaatgtaggatagagggagttgtttaatgagtacagagtttcagttttgcaagctgagaaagttctaaagattgaagtgatgaaccacacctgtgtggttcacactgtgtgaatatacttaacaccaccgagctgtgtgctttaaaatggttaagatgataattttatgctatgtgtattttaccacaatttaaaaaaagaatgcaggacagatttcccagctgttattacataaagtctagcttttacctcctttgtgttagaagagtgccaggtgtattttccatgccattatcacatctgtaccattccctcttggaacgatccctcttagtttaacaactacgacaaaagaaacccttgactgagctcgggaaagctgaggcaggtttttgggaatacatcccaccttctgactgtacttacgttactctttcttgcttcttccgaattcatttagccttcacctaatgatctggcttagttgcttaaccagagtagttaccagtgtttgccaagaagccatttcaaaataagctatttttattagagacatattgggcaatgtaaaagtgttaccatatgtaacaatgcaatactgaaaagcaacttattataattgtgcttattaacaaatcaggataggaagaaggggcattaaggtataataatttaaaggaatttatatatcatgttttggttatgtagactaagtgcttttttaaaaaaatgaacaaaacccaactctttctgttaattaacagatctactaaagtagacatagcttgaagcactgcggcacacaggggtggctctgggtcagaactctgctcttctagggcctagacgcagagacccctggcacccaaggcctcagttctgatgccattctctaacaaaagagaccaaggctcctggctcattccagcaccagggcagggaaagtacaagatgaacctagaagatcttgtgccagaaagtaaagaattgctgaaaaaaaggacagggcttgtcgaaagaacatgggagcaacataaaggagcttccaattgccaaatccgggacaatttgagaaagaaaataaataatgactgtaatgagttatatagcccacagaatcaattaatatgaatgtgttcatagtatataaataattgggtaaacatgtcagtggtgggagggagagctcttccctactcattctgactaatgtagaagaaatgatgggaacggaaaattgctgtttgacaaaccacagtggtaatgggtacagacaagaacactcagtggacactaaagttagggggcaatgtgtgttgtgaaacggggtatctgcagagtcttgagaacctcccctgaagatgcttagtgactcccaagggaacagtagtaacctcacagtagacaccaccctagctatgcggtcatcaccagatatgtgcatgcagctcgtagccctgatatcatgcactgagaactcggcatcactgctgtggttttcttgcccaaaatgtctcttgtccaagtactaaccaggctcgaccttgcttagcttccaaaatcagacaagatcgggtgtgttcagggtgatgtggctgtagactcttgcccaaaatgtgtagcctgaatctgatcatgaggaaacatcagacagaccaaagggccatgctacaaaataattgccagcacccttcaaaagtgttatgtaagatgttatctaggggaactggttatacaaactctgtcctatttttccaactttttggaagcctgaaattatttggaaatgaaaagaaaaaaaaaactctgcttccccatttgagtctgaaggatgagcaccctattattctttcttagatgtaatatttatatcattccttttattgcattatgtatttgcatttttaccttttacatctgcatttttatcttttctgatgctcataacggcaatgttaataatacctgttgggtggatattgtcatatcctcatatacttttcatagctgaggaaacaaagatttggagaggttaatgactttcttggaagtctcgccatctaacacagcccactgtagactatgagcttatggggtccctcctctcccttggataactaatgagaaatggtagcaggagtttctgtagtctggctgtccagccacagttgcttctgagattctggactccacacagctgaatcaatagacctgagacttcttgccatggagctcttgagggcagggaggtctggagtccacaggtgcaggggacttggatttggattggcttgcaaaagaaccctggatacttccacacaaattagtaaaagtctctgaagagtaaacttgtctgcccatcattctgtgcatacagattctaagtgtttagttctcactttggaaaaaaggttcctttttggcctaagttgaaatattgatgcaagagtcagacgtatggagatcaaattctcagcttcgttattcacaaagactatgttggagaatgtattatagcttagatgcgtggaaaaatgggcttctttttgacatagctctgaatggaatttcagccctaaagtgcaggcctcccttgtgagggtcatggttgggcggtgtggggcagtagagcctgccctactagctcactgcatcgctgagagaatagacttttctgcaccctctttccctgtaagaaaggggctgggccatttatgccctgtgtttctttccaactcaccaatcagataattaattcctttctcagaggaggaatgaagaggggaggagggagaggaaagtccaggagcattcatctagtgaagtccctactcagggaagtccgaggtgtcggagataaggatgttcctttcctcagggtacagggagggcacctcttggatgagggtcttgtcacctgcttcaggggagaagggtgaggggatatgattattatatattggttttgtagacttttatttattgtaacacaataaaatcccttttttaccttttaatcaatagatcttatgaatcagatatattaatagtagaaggtcatcagattatgagcaaagtgcagagaaactgccaggtcaccatgtatgtgtgcatatgtggttcttagcaggggagttggggcaggttgacacttctggagaattgtagtaatgcctcaatatatataaatgcttatacttttaattccaggagcttcctccatctttacaactactttttatagtagtaactgcagacttaatgatccctatcttacagataaggaagctgagacttacagaggtaaagtgagttgttcaaggttacagaactgggaagtggtagagaaaagacttttcctttgttcttatttaaaatactacttttatgtttcaaaatttttataaatcagtttttcattgtaaaagtaatgtgagcagagttcagataatttggaaagaggagaaaaaagtcaccagttatttccctgtctaacataagcgagtaaaaattatgattgctagaggaaagagacaaaacctccagaaaagtaatagaaaatggccttgggaggctgcagcctagttctctaggatcacagtttcagtggaaccaatatattgtgggaaacatttgacttctcttgaggcaaaagggagtcaggaaatgaataaaaggatctgattccagagcccagatgctcatttactatgaagttttttttgtaaccaagcttataaagtaattactaaagtaagaattggaatgtaagtgataatgatatagtatagttccaaatttttataagttatgtgttcattatatatatatatttaaaatagactaaaaaattcatcctgccttaacttaacatatcttttaaattagaaacatgaggagtcgtcacctcactgaagatatatattatgaagggcactcgggcatgtctctagcagggcaggaatatgaatatgtgggctgagcaccacagtttttggagagttagacatggttgttaacttgcatagggcttgaaagttcacaaaacacactcataacaaccattgcctttgcttctgcagacattgtgaagtgagagcacttcaaagatgagcctagggactcagggaagttaagggacattgtgaaggtcacaaggctagagaatggcttggctgacttctaatttccagtccaggaatcttttcattatttacatcatgctatacttgagggggatgctatgctgatgagcctcttgcaaaaaatgctggagtgctttttttttttttttttttttgagacagagtctcgctctgttgccagactggaatgcagtggcgcgatctcagctcactgcaacctccgcagtggttgggattacaggtgtgagccaccatgcccagctaatttttgtattttgagtagagacggggtttcaccatgttggccaggctggtctggagctcctgacctcgtgatccacccacctcggcctcccaaagtgctgggattacaggcgtgagccaccgcacctggctatactgggctgtttttaaattgccttgctcatcattccggtctggttggacaggtatggtgagccaatttccagttcatgtggtaggtgtgggtagctactttaggttcttaatctgaggaggcagaatgatgagcatctgttttaggaagagaagagtaacctgagagtggtatcccagtgtgtctgatgtgtgctggagtttgagaaccatggagtcaaagcagtagtaggaaggcattcttggagagcatttcagaattcagatctgaagtgatgagagtctcaattaatgtgatggcagtggaaatgaagaggaacacgtgtgtccgagagatacttgacagaagtcttggccatggtgaaagttgctctcctggtcattccttacagaacccatggtagccctagtgtgctggagaggggtgttaattccaggtgagcatcatcgtaaaccactcagaagagctgagtttatgtgctcggaggtgctgagctcccactttgtgtatctaagtgggggtgtgtatagtgtatcctcccaggtgacagtgtggccagctgagatgcagaggtggatgtttggcaagaggactagtatctgttcacagtctgtttcctggtaatgaaggatgaggtgtaaccttagcgagaattggcaggagttaaaatgggaacacctaatattcgaagggaacggatgttgagaaaaagagtgaggatttcagagctgatgtattttcttttgttcaaagaataaaatacatcctctctgccactatggtttctggcttttgcctgttttctgtcctcattttctctcattctctgccttgctcatcacattcccagtttagaatcccccctctgccctcaacctagatattcccatcgctggctccattatacagcaattggatgtcacctttttggagagcttttcctgaccatcctcagtaatgttgggccttctcctcacccctgcctcccaccaaaactaggttctcttccagaccacttatcccaatcagggatgaccctggtcagttcttggtctacttgtgcaaatctgtcttcccttctccagtagaatgaaagctctttgagagcctgggttcctgtgtgtcttgttcattgctgtatcgccagaacctagaagagtacctggcacatatttagcataaatattagttgaaagggctttaggcaaatatttgatgagggggacagaggtaggcgatggggaaagaaatgggtctatagaccccaggcaacacacagtgaccaacctggactggacggtagagatgagacaggataaattcaagagatgttcagaatgtaacactgacaaaatttcgtgatggactgttataggaggtgtcaggcaactttcttgtgaaaaatcttgccgtgagaggtttatgaactcctagcattcttacatgatctcttcattcactggaaacttaagggcaaagcaattcttagccctccatcaagagcttgcctcggttctactccatcctagaggaggtgtctcaaactctaggcatgaagaagtctctgtttctactcagagcagttgtacccgtccatccacccatttaccactcaacatattttttgagcacgtaatatgttctaggtattgtcgaaggcactggtgcacaggaatgactaaaacaacctccttgcatttatgtcctagagaggaaagacagacaagcatgtctacaaatgctacatgcacaagatacttttggatggtaataatggtgggagaaaaaaccctgagacaggatgggatggggtcagccaggctgctctgcgttagattagatctgaataacaagaaggagccttgagaagacctgcgaggagagaggggttctggccttgccttcataacctattcgtgctagaagagtcactgaaggggcactttgctttcatgttttaaagaatgaaattgaagaggttggtgggatggaagctcaacttcaaatacttaccaagtttatttatttttatttcattttatttatttatttatttagtttttgagatagcgtctcgttctgttgcccaggctggagtgcagtggcatggtcttggctcactgcaacctctgccttccaggttcaagcaattctcctgcctcagcctcctgagtagctgggattataaagaatgcaccaccacacccagcctagctaatttttgtatttttagtagagacggggtttcaccatgttggccaggctggtctcaaactcctgacctcaaatgatccacctgcctcggcctcccaaagtgctgggattagaggcatgagccaccgtgcctgtctcatttatttattttttttgagatggagtttcactcttgtcgcccaggctggagtacagtggtgcaatcttggctcattgcaacctccacctcctgggttcaagtgattctcctgcctcagcctcccgagtagctgggattacaggcatgtgccaccacacccagctagttttgtatttttagtagagacggggtttcaccatgttggtcagggtggtctctcactcctgacctcaagtgattcacctgccttggcctcccaaagtgctgagattacaggcactttgagcctgtaatcagccaccacacccagcctcattttatttttttgagacaaagtctctatcgctcaggctggagtacagtggcgtgatcatggctcactacagccacaaactcctgagctcaagcatcctcccactgcaatgcctgtagctgggattacaggcacacaccacatgcctggctatttaaaaaaacttttttatagagacgagtgctcactctgttgcccaggctggtcttgagctcccggcctcaagcattcctcctgcctcagtctcctaaagtgccgggcatgagccaaacatgcgtgctggtttatttcttatcagcagttttgtttgccaaatcatcctactgctcatttacttattgaaatatttcccttttgcaagtcgttacacaaaacattttagagatggctttaaagaacaaaatctctgtcaatcataagtgattaatatataattttcaaaaaaggataaaatcatgactcatatagatacaaaaatgaacatgttaaggattttatttaatcactgattattaattatagatgaggacatttggcagatgttataacaggttcaaaggagaaatcaaaacagaacaaatttctgtgaagtaaagtactgttgaaattaatatgcaaattcaggaaaactaacttattccacggtcggggagggaagttagttgaacctctactggccaggacaaaattaacatgcctatagacaacagttattttgcactgctattagttacctacgatttacagagttgtaatttccctgagaatcagaatctaattacctgtagaggtctcctctagagtctcaacagtgcatggttttccaatgaagcacatttttttcctatgtataaccagcctgtcctgtctccagaatccacacacagacacacacacagacacacacacacagacacacacacacacacacacacacacacacactcccttcggacaacttgctgatcgtaaagctatagaaattctctgtgcttttttcttgatctttagttcatcatcaaccaaggtggatctcaagagtggcctcgaagaatgtgctgtggcattgaacttatttctaagcaacaaatttacagacgccttagaattgcttcgcccctggtaatttactttgtctcttttagataaaatatctttcagatgtttctgatgattctttgatgtcatgcttgtaaattaatttagctgttcccatctgaatattgataagctaatttagttcagacctctttactttggtcacttttaaaattcaatttagaaatctgagttttcaaatataattaatagaaaatttctgattgttttgcatattttaatctctcttgttcagatattgtcatcttataagtagttttataaggcttcaattttgctttcttcagtgaaatgtttttatgtttgttccttttaaatattattgagaaaattttcctttgaaatggggaggggaaaaaccagaatatgctgatctcaatgctattaagaaatttaagataagaagactattattggggttctctatttgttcgaaaaacaagcaatttaatttcaattaatagtacctgttaagttttcagatgtggcaataaaacctgtgcttgcctgtttactcggcctttgtcttgacaagaataatcgtacattgtgccctcaaacacttgcttagatgaagcttagacctcatatgataatttccaagattacttgggcataaaagtcggcaatctcgttccttactttgagtggttaccagggtgactggactctggtcatgtgaatcttagagattgattgacctgctgaggagctgctatggtaattgtgttaagatttagaatagctgtaatcaagatgggtcagctattgtttcacaggttaagaacaaatgatgaaatcgataatgaagccctgtagtctaaggaaattttccagtgttgtcttcaatatttgcctcacaatctccaccttgcctgtcctctgcttttttccttctgtcctcctctgtccctcagacttctttgtctcctgtctctacctccttttgtctgcttgtctttccctctctcagtctctccttctcttttctcagcctacttgcctgtcttctttgggtttttaaatgcttttattgatgagccatagttgtacctatttttggagtacatgtgataattccttacctgtatacagtgttcagtgatcgatcaggttaactgggttatccatcacctcaaacatttatctgttcttagtgtcaggaacatttataattattctcttctagctattttgaaataatgataaattattgttaattataatttctctattattaaatactagaagttattgcttccatttaactgtatttttgtatccattatctcctttgatttttattcaaacgagtctttctctgccactgacacacagctggtcataacatggaatgaaaataggtgatttagtgttgtgttcagtcaggttagtctccgatttttgtacatgtttcagtgtttaaatggctcacgcctgtaatcccagcactttgggaggccgaggcagatggatcacctgaggtcgggagttcgagaccagcctgaccaacagggagaaaccctgtctctactaaaaatacaaaaaattagccaggcatggtggtgcatgcctgtaatcccagctactcgggaagccgaggcaggagaatcacttgaacccgggaggcggaggttgtggtgagccgagattgtgccattgtacttcagcctgggcaacaagagcgaagctctgtctcaaaaaaaattaaataaataaaaatacttttccctcacttgaatcatttttttttttttttttgcttcttgaaagagctttcagttaaaaatgtgaggtttgaaaccacaattaatgattaactttgggctgctctgattccttgtggttcttttgaacagatagtgccctcaatgttcaggacaagctgcaaattaccaaaggatgtttagactatttccatggaggcaaagaataatgtggcttgcatttgttttgcatggcagcaggctgttatgcattaatatttaaattaaaaacaaaaccatgcattaccattttaaaccttataaataattaatacagcttaagaagttttgagaaaataaatgatgttctcatagcccgagaatctggatgtctgccatctattaggactagttctagttaacatccttaagaatcctgaagcagttctcactgtaacttgatgatttgaaatatcaagaactttaatcaggaacttcagataatgggattagactagatacaaggtctgacaactactttggtcatggctcttgtgaccagcctaacttattccaaaatcttgtttgctcttggcctttggctggcgaggagagggattattttatataagcctttatttttgaaaaaatatatcagaatctctctgtcaaaaaatacatttccagcggcctttattttagcacttatttcagagccaaaggccgtgtgctgcccctttttcaacagaaaacagtttgcttgcaatctgcctgcaggctgccctcttgtgttgaaatagggaaatgcatattgtccccttcaacctggaacattttgttctgcctgtgtgggtttacattggaaagtccttggtacttgagtttttaagaggttacttttcaccacccatataatttcagtgattatggtgaaggaataaaggttactgtgcaagtcaggacatgcatttactaggatttcttatgatcagtatttccattgaattaaaatgtctgaattccctgtgttcttcccagggctaaggagagtatgtaccatgccttgggctacagtaccattgtggtgttgcaggctgtcctgaccttcgagcaacaggacatccagaacggcatttctgccatgaaggacgctttacaaacctgccaaaagtatgacgagtcattaaatacttaagatgtgactgcaaacttttatgcctgtgtgacaaaaataatgtcatttgcctgaccaaaagctctgtgtttgaaattggccacagttacagaaaagaaattcagcctcgaagctgaaggattcccatttggcatctacatattccacttttctttttgatagcctggggtctgagctacagagatctgggggggatttcggggggatttcagtgggattagcagcaagcatctctcaatgtagatgacattaggtactgcatgccaaaccaagccacacaaggaacattcttgttttaagtgggagatgcaaattcatgagggaatgttttatttgtttaagaaggacctgtttttgaacacttttgtttggtgaaaatgagatagatttttagttttattttaagctttactttgtgtgtataggaagaccctatcaaaatttttttcaaggggtaagttattttgatatcttttaaaaaatgataggtgtttcacagtatggaagatgcttggtttgtggacatttaggaatattcaagaatccaggaatggctggctgcagcaccctgatcagatggatgggaggaaatgacccctgttgctgtcaattgcttgatgtgccccccataggactagggcagaaggttcatgatcagaaggttaacatgggtgaaattacatcctgatgtaattgtgttgtaagctcctcaaatgaagagagcttccaaatattgcactttaacttcatttttaacctgtggagaattttaccacaaatactgattttagttatagggataagggaaggtactttggaggttagttttcattggtgtgtgtgggtttccccacgtggtgttcagtagcacagactgagttcccacaaatggctagccagtgctgcatgtagagtgttggaaaaggatgatctgtgtcctatagacttcagggtttagagtttcagctttttgactctttggtgtgatagtgactgaaatgaacgtcaaatgaaaatgagctcagcctgattttttttttctattttctatctccctttttatttattcaatgtagatacaggaaaaaatacacagttgtagaatctttctcaagtcttctttctagaggatccctggagcaactgagtgaaggtaaaagtcatttaaaagatcacttttttccttgattttaatagttaaatgatcatctcataaaattccatcctgaagtatataaagtaaatggaatgtctttttctcttccctatcatactcaccctctggaagaaatcattgttaatagttcattttgaagccttttctgtgtacatactcaaatacataaataaggtacacataaggtttttgttgttgctcatggattgttcattttttttttgcaagcatagaatcacataataggtgttgtcctacaatgtgaatttgacattgacacttccccagatcgttacatgtgagtgtttaacagctgtgtggtattccataggattgatatactgtactttacttggcttttctctatggtttttattttttcactgatatgaataatggtgtcctagaatccttatacatatggattcatgcattttaaaaagttatttcataagatagattcctaaaagtggaagaaccaggactgacagtttgaaaacttacaatatttataggtattcccagtttttttctacatataggtcagtttatattcttagcattcatctttgagagtttcagttttccacaagctattaaacatttttttcaaagtgaaagtaattttgatatcttttaaaaatgataatgtttcacagtatggaagatgcttggtttgtggacatttaggaatattcaagaatccaggaatggctggctgcggcaccctgatcagatagatgggaggaaatgacccctgttgctgtcaattgcttgacgtgccccctgggactagggcagaaggttcatgatcagttctgtcttttcagtgttacactctagtccacaatagtttacaagaaaggagcatctaaatattcctgtagaaggaaaaaaaaaagtccttcaaatgtcactattgtagaataaagcttttgccatcccaggagaatctgtgcctgtattgccattgtcaaacatgttctctgaagaggtaacacaaaatactagaatataccatactagagaacacaaaatacaaagctactagaagtagctttggctgattagagcaagagcaattctggatattgctgtcagagtagtttctaatggtcaagtgtatgtcagacatatttttgagtgtgttttattaggaagttttgtttattttgttagatgagtattatcaacttgttatggacgttggagaacttgggaacatttgcatgatgtgaagctagagtattgattataggagaggaattatgagacatttcacatctttgggacttatttcaaaggggcatgatgttgaccccaaaaccatggtcaaacagaatggcatttcattggtcattctaggcagctgaaacccatcatctttttctccagaaactgacctccaactatttgtaagaatgtatttatcctcttgacttcggatagaatgtgtctgcatattttccatctttgagctgcttatgtaaattagtcccgttagacctaaagttcactaaaatgggttaatgagaaatcaaataggcccaaaagaaattgaacctttttgttgtattctcctttctgttactctctctatggtttccctctagtggcccattgacctctgcctccctttttccttttagtatgaaggctgatatttgagattttttttagctgcattttggcatgaatgacatggtattttttgtatgagtataaataataataataatttggccgggtgtggtggctcacacctgtaatcccagcactttgggaggccgaggcgggtggatcacaaggtcaggagttacagacgagcctggccaacatggtgaaaccccgtctctactaaaaatataaaaattagccaggcatggtggcgcacacctatagtcccagcttctcaggaggctgaggcgggagcttgaacccaggaggtggaggttgcagtgagccgagatcgcgccactgcacttctgcctgggtgacagagtaatactctgtctcaaaaataataataataatttgaaaaataagatgataatgctcctttttttttttttttttttttgagaccaagtctcactctgttgcccaggctggagtgcagtggcatgatctcagctcactgcaagctccgcctcccaggttcacaccattcttctgcctcagcctcccgagtagctgggattacaggtgcccgccaccacgcctggctaattttttgtatttttagtagagacggggtttcaccacgttagccaggatgtctcaatctcctgaccttgtgatccgcccgcctcagcctcccgaagtactgggattacaggtgtgagccaccgtgcccagctgataatcctccatttttaaaaagcatcctgtatgtgctatatactgtccttgttgcttttcttaacattaaccaatctaacctcctctttgtagacttggaactgatcagagttataaacaaatggccaggattccccacctagcagagtagggttaactgatcatctgcctttccctaagccacaactctttcactgtaacccacactttctcctataggcaagtagagaagggcatgaaatgtgtcatatacggatgaaggaaataatgaattatttctgtgttagtcatcttgaaaatagatgatactgtgttgttatatttttataatgtctttgaacaatggcactttaggaaatctggaataaggtagaaaattactttttactaattataaaaagtaggctgggcctggtggcttgtgcctgtaatcccagctacttgggaggctaaggtgggaggatcccttgagcccaggaggtggaatgtattagtccattttcacactactctaaagaactgcccaggactgggtaatttataaaggaaagaggtttaattgactcatagttctgcatagctggggagacctcaggaaacttaaagtcatggcaggaggcaaagaggaagcaaggtaccttcttcacaaggtggcaggaaggagaagtgcgtgtaggaggaacttgtcaaacacttataaaaccatcagatctcgtgagaactcactcactgtcatgagaacagcatgggagaaaccacccccatgatccaaacatctcccaccagttcccacccttgatacaaggggattatggggattacaattcaagatgagatttgggtgaggacacaaagcctaaccatatcacagaggttgcagtgagtgcagatcatgcccctgtactccaccctgggtgacagagcaagaacctgtctctacataaataaaaaaaataaactaataaacttgtgactatagcctattatgaaatacaggtttatttagactttcatatctaaataaacttagcttatttagctaagtttatttagcttagctaacattatttcagtgcatcatgaagatatttactcctgtggactaaggaatttataattaagagatattctggtagttacctactcataagtgcctaatggctaattttgagaactaaagaactatgcaatgtaaatcaaccacagtgaaagaataagacttttataaattaagctgtattttattcttagtgagtttggctgtcaactgcaacccaaacagactttgtgttcaagggagcatgtcaaaacattgtagctttagtgtgtgatttgtttttcctcttggtaattttcatttacatccttgagtgtctggttgtctacaggagtgagtatatttcattaaacttttcatggttttaatgtggaacatactagttcttttctcttgtggctggcggattgccccaaatgggtttcaaattgcctttacaaacagatatttaaatgcaatgagtgcctgggatgtgaaagggatttaatatgacagatacttatttgcagaatacaaagttcaaactctcatgccttttctgtctgccttgttgtcacatccccatgctgctcttaactttgttcatctttcacttaaccctgatctgcccacccgtctgctcagatctctgcagggactgactcactgttgcttcctgaatcaagtgcagactctaacattcaaggccacttataattgagccttgactgagcccttccagcctcattgatgtctcctcccttgactggcttttcctgaaggtgctcttggctttccttgctcctgttaccagcacagtcccctccgccccggctcccccaccgctgccatcaccaccacggacttcatcccctctgcatgtaccccaagccagcaatctgtattcctgagcagactttcatagctcataattcctggttctcactctgttacagaattacctaggaagaggatattcaggtgactgggtaaaaataagttaccagttggtatcccgctgaacacagctagaaaatcactaggcacactttgaggagaggtgttctgaaggactgagaccctgactgtggatgtgcaggctctaactcctcaagtttggtctgttaatggctttggccccatctttctgtgtactgttgaagaccttagctgcagaggtgcttctttgtaaattaaacattggaatatgagcatggcaggaacttgaaccaatttatgagaaccagtgggttgtatgtgtgtgtagggtgggggtggcatctatgtgtataagtgcaagaaagtacttgttgtcatctaagtctatttagcactaatcccaataataagaaataccctattttcagtcacagtccacataaaaatgctttcttctttctgagcttttaccaaaaagcagtgacacggatcatgggcagtaatctcagtgcacgtagttagcactgatccagtgcttactctgtatcatgagctctatgtgcagcacttcatttgatccttcagctgtgaactagaggcggcgttagtggcctttataaatgaggaaaccagcagagaggggacgaggtcccatagctcgtacatggcagagcctttttagcagctcaggctcctaaataccccaggctcgtttacttaaatatcatgccactttgcatcccatggatagagcaagaatctgctgacttgtgtatggaaaaaagtaaaggtttgtctctccatcctctgcaagtataatggttggttgggaagctagggtgtgtgttttggggtactccgcaggtccctgggatgcacagagccccacctaacccctttttgtgagtaccttgttcttgtgctagacatctacatgatcaaattagcctgaaactggggtagtgctacctctttctatatcaggtcttcatgtgtgaggagtcttaacgtggccgtgcaggacatttctttttcaccgagctctagagaattgctgctttcttttcaggtagctaatgtgtctggttagtgtcatggttaccataccttcatattttagaagctagcattcatacatttaatttagtttttttcaacttttaaaactgtgtgaaagttgttttttttttttctttttgagatggagtttcactcttgttgcccgggctggagtgcaatggcgcaatctcggctcactgcaacctccacctcccgggttcaagtgattctcctacctcagcctcccgaatagctgggattacaggcatgtgccaccacgcctggctaatttttgtatttttagtagagatggggtttctgcctgttggtcaggctggtctcgatctcctgacctcaggtgatccacccacctcggcctcccaaagtgctgggattacaggcgtaaaccaccacgcacagccaaagttttatgttactaattaagttaaaaaataagtggtttccttttttaaaaaagtgcttttaaatgttcatttccccttgtgagttgagtttgcgtctctgatacgaagtgactgactctttgcagttacatttgaatggggatgacttccctgaacacttcacacattccaggaaaatcttcctgacaaagtgagaactggggttatcattccacttttgtggaagcacaagggcaatctaagttttggggtctctcttgggttcatttttctgccagtctttcctgaacatcacagagcaatcactttggatgtgtgattttacttaatataattttatttgttttttgtagaggaaatgcatgctgaaatctgttatgccgagtgtctcctacagaaagctgcactcacgtttgtgcaggtaatgaatatttggcttggaattcgtattggctgggaagactgccagtgctgcatagaaaaatgtggtgcattctatgtcaaagcttcagttcttttgacttagagttgtaatggcaaatatttgttattctgataaactttggctgaaaaaagatgctagagagctttgttcctcctctactgcacttaagaatctatttcaaattgcactccactgggaatcattgccctttaaagactgtgtctttaaagaaactttaggccaggcagggtggctcacgcctgtaatcctagcagtttgggaggctgaggtgggcggatcacctgaggtccagagttcgagacaagcctggccaacatggtgaaaccctgtctctactgaaaatacaaaaaaaaaaaaaaattagccaggcatggtggcgggcgcctgtaatcccagctacccgggaggctgaggcaggaaaatcacttgaacctgggaggtggagatttccgtgagccgaggtcctaccactgcacttcaccttgggtgacagagcaagactttgtctcaaaaacaaaaaagaaactttaaagaaactgctttgcaaccgtcacatctaattttaagatgcatctgtgtggaaaccgggagagtattctcctttgcgctttctactggtagagtccgcacatgggagtggcccgggcagaggaagtgtcccctgttacaccacttgcctcagtcaagttcagttatgcatgcatagcatgtatacttcaaattttatttttccccttctttctatattctcattctcctttcttttatttcttcctttggaagagcagtttttagaagtcactaaacaatccttttcttatgatccattttaatttcacctctgggaactgatacagtcagtaccttgcctatttctgtatcttccaatgcttctgtaaaacataaactttcacataatggcttcatgggtggtagtgatggctacagtgagggtgaggtggggtagagattgtaagaaatcagaaagaaattcagctgtgaaatggaaaatcttccctcactcacaatctttttttttttttttggtgggggaggggtggcagggtggttggagcctcattctgtcacccaggctggagtacagtggcatgatctcggctcactgcaacgtctgcctcctgggttcaagcagttcttctgtctcagccccccgagtagctgggattacagacgtgtgccaccatgcctggctaatttttgtattttcagtagagacagggtttcaccatattggtcaggctggtctcgaactcctgacctcaggtgttccacccacctcggcctcccaaagtgctgggattatagacgtgagccactgcgcccagccacaatcttttgaattatttgacagttgcttctttcttttcctggaggtttacctcttgggttggattctggtttagtaaaacggaatcactgtagcccatgaccctgtttcctaaaacccagacattacaaagactggttgataacaacagtcttactgcctcagtaagcatcataatgatagtcatggaggcccaagtttttttctgttttccaaacagggatttggcaatcaaatctgggatttgaaggcttattttatatttggggatttgaaattaaagagatatccatgtttgtcccctcttcctcatgactcccacccagtcacctttatattcatgctgctttagccttttaaagattgtgcagctccgtctcttcctatcattgttctagaagaagtgcttatctactcttttctggactgcacagcaacctagtgactctccctctctaatttcttttaccttcagctcattccctattctgcagttgagggttgagtaacctcttaaaaatgagtctctgacctggtcacttctctgcttcagcattcagtagctctgattgattgagtatggcagtattctgtatcagaatgtcacaaatgaggggggtactttttcaaacaaaactggtacctcctctctatgttccctacccgccccccgcaccttacaggtgtccttgaaagccactgacgggtttgcatacttgagtagcatggctggaggtagctttcttaactccttggtcattctctttgcaatagattcttcagcagtgtggaattacatatgcacacatggccaaacccatcatgatccttaatgccaccctgtctttccacttgagttttactttgcttacaaaattcacatctgctttgcctttctatacctgtccagtttctaattatttttgtgcttaaagcaccaatgcttccaggaggcatgtctggccctttccatgccactactttgtgttctcatgacatcccatgcatgatcccgtccccgtgcatggctccctccccgtgcttgacgccctcccttaacatattgtattactttcatctgtttttgcatttgggtgcctggtataaaataggcattaagtttaagtttgatgaatcctgaaatgagatatgtttgtttttttttttttgaggtatatttcaagctaatttaagaaattcttttctggttggtattggattttatgtaatcataagattccttaatttaagaagataaacattgaatttcatatctattgattcttataataattagaacattaaatatttaagcaattaatgaaattagtaaatgaaattcagtttttcttttgctacagaaggatgcttaagtacacgagaaatacatatcagagcatctttcttttttcttctttttatttattgttttgagatggagtctcgctctgtcaccaggctggagtgcagtggcgcgatcttggctcactgcaacctccacctcccaggttcaagtgattctcctgcctcagcctcctgagtagctgcgactacaggcacccgccaccatgcccggctactttctgaatttttagtagagacggggtttcaccatgttggccaggatggccttgatctcctaacctggtgatccacccgcctcggcctcccaaagtgctgggattataggcgtgagccaccacgcccagccagagcatctttctgatatcaatagactagaaaaactttctctctggatatgcaaaacgtaggactgtctccactagtaccatctattagagtaacttccttcaagtggttatttgatgtaatttattgtcttagaatcctagaatgctgaccctgaaaatgccattcatctaggccaacagcctcaattttatggtcgatgacaatcagataaacagaattgaagtggtgttgttttcctaaaacaaaattgtgtagtagtgacagccacttcagaaaccagaccagttattttgggcctagaaatgtgtgtgagtaaaattcgcaacattaaaaagactctgactgctaaagtactctgtgaaagaaggaccattgtcccatttactgggtgtaatgtactggaaggtttggccttagagcagattgttaaagtcatccattttacattctgttaaacccagaagaaaattgctcagtagatgtcaatgtttattaaaataatttggaccgcatatggcccctaattggtgaggattacctccttagtaatataaaataatcgaaggattttacaagtattttctttttgttgtcctctaatgtggaagaaaaattaccccaaaaacttttaaatgtaaagcaagagtatgtgttaatttcaaaattatgtcctcaaaatacttttttttgtttgtttgtttttgtttttctaatcacacaaacacacaactgtggggacaatttaaaattttttgctaaataatctaattttttaactgaattattttcaggatgaaaatatgatcaacttcatcaaaggtggactcaaaattagaacaagttaccaaatatataagtaagttaaaaagtaagatgtggtttgtaaataattttgtgctgtgtactcctttgttcttcacagttctcctaaattaagtttgactaggattttttttttttttttttttttttttttttttttgagacggagtctcactctgtcacccaggttggagtgcagtggcgcaatctcggctcactgcaagctccgcctctcaggttcacgccattctcctgcctcatcctcccgagtagctgggactacaggcgcccgccaccacgcccggctaattttttgtatttttagtagagatggggtttcactgtgttagtcaggatggtctcgatctcctgacctcgtgatccgcccgcctcagcctcccaaagtgctgggattacacgcgtgagccaccgcgcctggcctgactaggattttttatttggtgttggtaaaaatgaacttaattttttgttgagtgtgtattcagtgttataggacaacagaatttaagtttaaatacaattttaagagctagctgaaaataaagctactgacataatttctgattagataattttagttttctctctccttagaacagtttataaatttaaaattatagtaatatctttggttcagactccagagcagcactgcccagtagaactttctgcaatagatggaaatgttcagctgaggtggctgtagcgttgttcatatccttattgatttttatccagttgtctgttatttactgagagtgttaaaggctctaagtttgaatctggagtcatccctttcttcctttagttctgtcagtgtttgcctcatatatttaggagctctgttgttaggcttttataatatgtatttataattcttctgtcttcctaatgaattaaccttttcatcatcttgaaatgtctctatttaactttggtgatattccttgtcttgaaatctgttatgtctaatattcatataggcactcatgctttttataattagtctttgcatgggatatattcttttactttaaacctatttttgttttcatatttaaattgtatttttaaatatttaaattgtatttcttgtagattcacatagctgggcagttgaatgtttgcacttgtgactaccattttgctttttctctttgcctcatctgttctctcccccttttttcctgtcttcttttgctttaataacatttttagaactgttgttctcttagctgtagtctaatttttttgtggttgctctagtgtttataatattgtttttaagttattacagtcaacttagagttaatattgtagcactggacataaattataagaagtttgcaaaagtgtaatttcatttaccacattttgccctttatgatatatatatatatatatatatatatttttgcgaccgagaccttgctttgttgcccaggctggagtgcagtggtgtgatctcagctcactgcaacctctgcctcctgggttcaagcaactctcctgactcagcctcccgagcagctaggactacaggcacataccaccacggccagctaatttttgtatttttagtaaagacggggtttcaccatattgaccgggctggtctcgaactcctgacctcgtgatccacccgtcttggcctcccaaagcgctgggattacaggcatgagccactgcgcctggccctttgtgctatttttatgatgtatagcagatttacatatattttaaaccctacaatgcggtgtcagactttctctttaatcagttatatgttgtagtcttctctctttacccatattcttaccatttttcatattcttattcaaaatggtaaatatatttcctgtttactttcagactaaagaacttcctttagcatttcttagagggtgtcagctttcaacaaattctgttttcatttatcttaaaatatatttactttttactttttcttttcaagcttatttttgctaactatagtattctgagtcgatgggttttttttccttctttcagccctttaaaactggcgtcctattgtattaaagcctgtgttgttcagtttttcatttgtattattgttcccctatatataatgtgtcttttcttctggcttttttgaagattgactagtttgtatctttgggtctcagtagtttgactatgatgtgcctaagtgtggttttgagaaatttgtggtcataatttttcaaactttttttttctgccccattcttactttcttctctcctgagactcctacttttttcccttcattttccactgtgtaaaaatatgttttaaatgtatattttgatttttccacaatttgtaatagttacttgtgggaaagttaatctgacataagctaccctaccattactggtagcagaaccaaaatttagtattttaagaggtactttcactgaaaatcctttcacaaaactgtgtttcattcaaaatcctggaagggggtggtagatcttgggtacctgacatgctgttgtatagatttctttgtgaaatatttttagaaggtataaacgaatgttaaattcaatgctaattgctgttttagtcatcaaaacctaaaaatactaaaggattaaaataggactgtagaggcaaagacatacaggtatacctcagagatattttgggttccaggccactacaataaagtgactattgcaataaagtgagtcacacaaactttttggtttcctgctgcatataaaagttacgttgatactgtactgtattctgttaagtctgccaataccattatgtctaaaaaatatacataccttaattgataaacacttttttgctaaaaaatgctaacaattatctcagccttcagcaagtcataatctttttgttggtggaggtcttgcatccatgttgatggctgctgacattcagggtggtggttgctgaaggttggggtggctatggcaattttttacaaaaggacagcagtgaagtttgccatacctattgacttttcctttcataaaagatttttctatagcatgcaataccacttgatggcactttacccacaggagaacttctttcagagttagatccatgctctcaaatcttgctgctgctttatcagctaagtttatttaatattccaaatcctttgttgtcatttcaacaatgtttgtggcatctttaccgggaatagatttcatctcaagaaactgctttcttgctcatccataagaggcaactcctcatccattaaagtgtcatcatgagatggcagcagtcagtctcatcttcaggctccacttctaattctagttctctttctgtttctaacacctctgtagttactttctccactgaagtcttgaacccctcagaatgatccatgagggttgaaatcaacttcttccaaactcctgttaatgtggacattttgacttccttccatgaatcacgaatgttctctatgataggtagaatgatgaatcctttccagaaggttttctgtttcctttccctggatccattagaggaatcactatggcagcaatagccttataaaatgtacttcttaaataataagacttgaaggtcaaaattacttcttgatccatgggctgcagaatggatgttgtgttagtaggcatgaaaacaatataatccttgcatacatctctttcagaactcttaggtgactaggtgcattttcagtgagcaataatactttgaaataaatgtttttttccctgagcagtggatctcaacagtaggctgaaaatatttagtaaaccatgctgtgaatagatgtgctatcatccaggctttgttgttttaattatagagcactggcagagtagatttaggacaattgttaagggccttaggatatttggaatggtaagtgaacattggcttccatttaaagtcaccagttccattagtccctaacaagagtcagcctgacctttgaagttttgaagccaggcgttgacttctcctctctagatatgaaagttctagatagcatcttcttccaatagaaggccattttgtctacattgaaaatttgttgtttagtgcagccaccttcgtcagtgatcttagctagatattctggataacttgctacagcttctacataagcacttgcagcttcacttagcactttttttttttttttttttttttggagatggagtctccctttgtcacccaggctggagtgcagtggcacgatctcagctcactgcaacctgcgtctcccaggttcaagtgattctcctgcctcagcctcccgagtagctgaggctacaggtgtgcgccaccgtgcctggctaatttttgtatttttagtagaggcaaggtttcaccatgcttggccaggctggtctcaaactcctgacctcatgatccgcccaccttggccacccaaagtgctaagattacaggtgtgagccaccgtgcccggctgcacttttttgttatagagatggtgtctttccttaaattcatgaaacaacctctgttagcttccaacatttttttcttcagcttcctcacctctctcagcctttatagagtttaagagttagggtcttgttctggattaggctttggcttaagggagtgttgtgggtggtttgttctatccagaccactacagctttctccatatcagcaacagggctgttttgttttcttatcatttgtgcattcactgaagtagcacttttaattttcttcaagaacttttcttttgcacttacaagttgactaactgtttggcacaagaggcctagcttccagcctgtcttggcttttgacatgccttcctcactacgcttaattatttctagtttttgatttcaaatgagaggtgcgaatcttcctttcgcttgaacactgagaggccactgtagagttaccaactggcctaatttcaattttgttttgtctgagggaatagggaggcctgaggaggagagagatggaggaacagcctatcagtagagcagtcagaacacacacaacatttattgataactttcgctcttatatgggtgtggttcagggcaccctgaaacaattactgtaatagtaacatttaagatctcccatcacaggtcaccattaacagatacagtaataactaaaaagtttggaaattttatgagaattactgaaatgtgaccctgaaacacaaagtgagcacatattgttggaaaaatggcatcgatagacttgctcaacacagagttgccacaaatcttcaatttgtaaaaaatgcagtatccacaaattgcagtaaaacaaggtatgcctttacatatcagtgaaatgaaccacagggttttttgaaagagacagcatgtgtgtgtgtgcacacacatggacttacacacacacgcacatacttacctgggaattcaaaatatactaaattcctttatatagataggccctttcaaaacagtgaagaaagataggtactttagtaaatgtttttgggaaaattgttcattttatagaaaaatcattaagacgaaaaaagtccatataggtttaatattaaaagatttaaaaagaattctagcaggaaacataagaaagtacttttataattcttaaatataaaggctttaaacttttttgttttttattttttcactttgaaataatttgaaaattattacaaaaaatttccatcacttgtatggaagattgtaaatcgtcactcagatttacaaatattaatattttgcagaagcacagtacaattattaaaatgaggaaactgacatggatacagtattcatatttactccatggcctttactcacatttctccagttgtctcatcaatgccctttttctggctcaggatccaacccgggatcctggatatcgaggttagctgtcatgtctccttagtctcttttcattcggaatagttcctcagtctttgtctttaatgatgttgacattttaaaagaataaactggccaattatttagtaaaacatctttcaatatggacttttctaatgtttcttcatgattaaattcagattatgactctatggcaaaaataccttagaaatgatatcattaggtacatgatgtcagtttcaaaggccttttaactatggcataaaatcagaaatcagaagaaattgattgagctgaccaaataaacattcatcattttatcttggcaaaatgcaccataataaaaaataaatgacccaggggaaatgacagcaggggatgcttgtaggcatctgaattgactctctaaacccttacattttttgtaaactggaagttaggtctataggcttgctagattcagattaaaaatatttggctagactggatcacaagtgtagttgcacattttataattgcatcacaccaagtgattcatgatatctcattattccttattattaaaaatatatttgccaatttaataagcaattcccaggtattatcaatttttatatttttgtcattgttttaatttgtatttctttggttaaatatttgccttttgaagatgatgtgaacaggcaagagagaaatacatagaaagtaaagtgagaagttggaaagattttcatggctggagcaggaagaaagcagaggacagatggggccattgtgatggcctttgctttcttgtttcagtctgtcctggtcccaagccctaatttatttggtctgtttgagacgatggcagtcacactgaaattcagatcttcttgccagtagcatttcatttcctcaggttgctgcagtgtgtgcagtggtggaggagctgagcgcttgcagggagtccgctgtgatatgctgccggaagctgtgggatggcagcctgtggtcctgcggctcctggctggtgcttgccaatggatgaaccctctctttaagcccagaaacactggtcctgctagacactgtaaaaatgagcatctcctttttctttgatgattattacctagtatccttaagagtaaactcagcacagcatcatcctttaaaattttgatggtattttaattaatgacatttattttatagcacataagtgtaaaatttgatttaatatttattttcagagtcatggtcaacttatgctgtcactttttttcttcaacccagagaatgtctttctatcctgcatgaaattcagaagaacaaacttcagcaggaattcttctatgagtttgaagggggtgtcaagcttggcagtggggcctttaatttggtaaggaaatcactgtatagaaaccagaacttttgtagaagaacctaaggttttctgtgccttctccactgcatttgaacctcatcctgaacctttccttgggttggttgacaaacagctagagtgggatcagttttctggcattgtgacccagtgtgttataaagttccacacatgctcagagtagctttggattgtaaaatgtaagggaagcgtgtggtactctgaatagactagtaaggtttttggtaacaaggaacagtggaatccatttccatttccacagcagaaatattgttgcaatgacaatgacggctctggaattgaaaatgtgtgagggaccagtataacttgaggaatgatttttgatgattcctgaggagatggaagtctgagtagtaatctgtcaaattccaatatgtgattaagagatttttaaattttattgatggttcactggaattagtgagaaaataaagtgatcaagagaagtatacacatgagtgaatgtgccactatggccactttgcttatagcctgtggggtgataaatgggaaagaggctgactggtacccacagaatggaccatcttatccaattggttgttaaaatcctcttctgctaaggtcatcctttggtgtgtatccacatgggacacaaatatctttacattttctgcccattcagaaagatctgaccacgtacttcttccccagacctctttgtcaccaattttccaatcatgatccttctaagcccctgcccttccaaccaaaccattgtctacatcccctgaatcagcatataattgcacatctggccatttctcctttcaagcatagtgcataaccaggtgcactgcccagggttctgcccactggaaggatattccctcaccactgtccttcaggaatatcccagagagaagtggtagtgctgcagctgtccacttctgggtggtgtctacacatcacacagactatgactgatttttgcttctgggaaaggaaactaagaaaccttgcctggatgtgggctttgaggggttaccttcttgtcacttcatcacaccacatcaaaggtcccagtattctatagagaaccctggaaagaccaggcttaaaaaaaactttttaaaggttccttgtcttagctaaatgaaattaattcataaatgattgttacagtatgtggtaacagaaatatctggtggttaaaacttgttcccaatttctcatgttattgaagcattaaaactgtaagttgttagtttagatttgtttgcagttagaaacactaacacataagtacactgtatatttttttcttacagatgctgtcccttttaccagcaaggattatcagactactagaatttattggattttctgggaatagggtacaaatttaattttatgttaattttgacagggaagataagacagtatttattgaacatgagggcaatgcaacatgtctgcataactaccttgataattattggcaatttgtttgtaggacagaaaataagcctttgattcttgatcatgtttttcaggacttagacatagtttttctgatgaaagttaaaaatgttcacccttgttatccaaattcttggatgaaaaattatgtgttgctaatattgcttcttgctagatcttattactctcacgtggtttcctatgctttcttaatagttgaccaaagatgggaggggtgggggaagagagggttgaaaaactacctgttgagtatgatgttcactcttgcggtgatagggacactaaaagcccagacttcaccacagcgtaatatatgaaatctgtacttgtaacccccctaatatataaaaatgtttaaaaagtttctgaatatgattttccagtcttgttctctttctaaaaatgcatttaattcccataggagttgggcctcctgcagttacgtgaaggtgcttcaggaaggagcatgaggtctgcactgtgctgcttaaccatcttagcttttcatacttacatctccctaatacttggtaagatctggattagattgtttcattgaacattgattgtcttggccagacatggtgtgttacacctgtaatcccaactacttgggaggctgaggtgggaggatcagttgaacccaggagtttgaggctgcggtgagctatgatcacgtcactgcactggatccagcctgggccacagagcgagatcctgtctctaaattaaaaaaaacaaaacaagacaaaacataaagttgattatttttaatctgagtaagtaaaaatttagaaagatcagcaagagctagtagttcatatctgtttacttttttttttgaataaaggtagaaaatagtgtcctttgtcatagtgacatttagcagaaggagtagggtagtttctttcattaaataattttcatctgttctcagctaaaatttctatattaaggtgatctattttatcatatatgagatttttttctttgcagaaaatgaaattttgggctaaataagttaatattgctgttaaaaccagaaattccaattaggaatctgagacagccacctgcattcttaagaattagtgtgtcctagagctttcttaaactaaagttataggtgagactggtctttattttattccccagatataaaaatgatgaaataatagttttcatcttttccatgagtaggtctttactgtatgttaatgaaatttggagagctggttataaatatccccatgtcttatgaagactgagtcttttcctgttaaatttctaggtacaggagaagtgaatgttgcggaagcagagcgtctcctggcacccttcctccagcagtttccaaatgtacgctcagtatttcaaagtgtatgtttcaaccataattaatcagccagtgttgactgttgaacagtgtgttttcttccttgctctgcagggctcactcgtgttgttttatcatgcccgaatagagttgctgaaagggaatcttgaagaggtaatttattaggtgggaattatttgggggagttgtctgtatggcgactcctacatgagtcgctgtgacctacttattcaacaaaagtaaacttggctatatggactagacaaaaataaagaaaaaaatatataagtaaaaagccaaaacttttaacttgtatatacattctattatataaaatctatgcagtggattactgaatatagtctacatttatacatagagtacattaagcactttagggtaatatataccaaataacaagctcagggattttcaagaaactgtgactgttaccaatttctgcattacacactgactttggaatctagcccctgtgtgacatgcaggtctactacgtgtgggctccgtatcaaaggacccctcaaaaaacgaattccctcaaaaacgaagcgtcgaggtcagaagtagaaaagtaaggagccatttatgtatatacattcacaaaccattttttccacacaaatgggatcaaaatgtatttttctgtgatttttttttcactgtttacaatatgtcttggatctctttccagatcagtatgcctaaatgtctcctattctttttgatggctgggtttcatttcatgggatggatatactatacctattaaagtggtccatagacatttggccactacaaactgttgtgaacatcattgtatgtatatttctgtgcacaggtacatttatagaagacagattatgattagtagaattcctgggccaaaaggtggttgcatttttataaatccagccaaattgtcctcctcacttaagattgttccagtgtaaactccagtaaacatataaaaatatttttttccaatgctctttgctggctcaggacattacgtgatggctaaaaatgagaatctaatttttaagtttatattgcctagtttacaaatttatccacatgtatatctgtcatctatatatttttttctgatttgcctatttacatctttgcctgtttcctgttgagttttctttttcttacagaattttattaaattgatgaatgataaaagagttaaccttttgccagttacgtagatagtgacatcttcttcctgtctgttgcctgtaactctgcctacagtgttttgtcctatggaagttctaactttattgtcagtcttttcttaaatgatttctgcatttgatatcttccttggaatggaacctccccactcccacattacaaagtgtcaaggccctctcacaaaattaaagaaagaggcagaacttaactgtatcattgcctgtaaggaaaagaacatatcatcatattgagaggtttaatgagtgataattttgtcctttttgtactaagtgttttatgtatttttccattaggttattatctccttgtctaatatctggacgatcaactttgtgtacttgatttacaggcacaagaagtatttcaaaaatgcatttcagttcaagaagaatggaaacagtttcaccatctctgctactgggagctaatgtggattaatgttttccaacaaaactggatgcaggcatattactattcagatctgctttgcaaagagagtaaatggtccaaggtaaagtgcaatactttcattaatgtcatctgtttgctaatacatggccaggatgattttcatttaggactgtttgctcagtagtatgataccacagtgttttctcaacttagagatccacaaaaggaggaaatgtgccttaagtacccactatttataggtactgtcctcagcattgcatgctttaaaagccatctactgttcttttcagggccaaatgcgatggcccatgcctgtaatcccagccctttgggaggctaaggcaggaagatggcttgaggtcaggagtttgatactagccagggcaacatggtgtgattttatctctgcaaaaaataaaaacattagctaggcatggtggtacatgtctatagtcccttctacgtgggaggctgaggcaggaggatagcttgagtccaagagttcgaggctacagtgagctatgatcacaccactgcactccagcctggtgacagagtgagaccctgtctcaaacaacaacaaagagttattttaaacatgaggttttatctctgaaaatgagttgtacttataaagttatgaaatcttaatcatgttgataattttgtgtagactttccagtgccctgatgcccaggcttttcatgataatgaaaattaattctgatccacttatgagaagttggagggcaatgagataattttttcttgttcattctgtccactttctcacctatgaatgctgtagttgtataataggaaaatggtttaaattatgggtaattgaaaagagttgttgtcattttgaacagggaatataagatttcatttcctctgatttctttaatgcctctaattttatatctggaagacttgttggtcattcctgatttgaaaggtagaaatgtcatttacctagggatgttctgtaataagctccttctttttctcaaggcaacttatgtgttcttgaaagcagcaattttgagtatgcttccagaggaggatgtagtagcaacgaatgagaatgtggtaactttattcaggtatgtgagacactattcctataacaaaggctctgagggtataaaggggcaaaatctcatctctactgaaaatacaaaaaattagctgggcctggtggcatgtgcttgtagtcccagctacttgggaagcttaggtgggaggattgcttaagcctgggaggtggaggttgcaagtgagctgaaataatgccattgcactgcagcctgggtgacagacagagtgagactctgtctccaaaaaaaaaccatgtatattaactgtagcatcaacatcaacattagtaaaagccatggcatgataaatgtcactttttactgtaaagttcatttccttattttacggaaacaacaattaatggaagggagtattaagatacattaaaatcttttaaatctccttctctttcttccactgcagattaagttttctccatatcaaaacagtttatgtgaaagatgtgatcatttttattttcaggagaaagctttgaggtcttgctctgtcatagcttctaggttgttgggataatgagagttctaacaatgaatggtctcttcataaagatgctgttacctttaaactacaagggttcctgtctgagacatgcttctgaccccttcctctgacccccacctcacatttccactgccttttccactgacggtaatgaacaaaaatgatgagacactgtagtttaaaatccatagctccatattttgcccggaattaacctaacataagcttgactcatattggaggcatattatttcatgttattttttctttcagtgatgtaattgagtattgccttgaattctttctcagcaacttgtttgatgcatccataaaattatgcataagaaagtgctcccaggaacatgtagtctccccatcctactgtcatttttacctgcttatgaatttcataattggaattctgtagaattttaaaaggaagtttctaaacatggtacacatcctaagctgattatttcccaaacaacctgtgcttgggaaacattttcttaaattatacgttaattgttggctgtcttttgagccatattattttatagatctgtgtaatacttgcaaataggaataggccatataccagtgtaccctcttctctctccctgagtatccacaacgtaagtaaatactttggactctttcctgcttactcgtagaaatcgccagttgtatacctagatttcctggactgtgtttgatagatttaagacattagctaagttgactggaaagaaatatgtgtcagtcagtggttctcaatcttgagtgtgcctcagaatcacctggagggcttatcaaaatctagattgctcggccccggccctggagttgctgattcagtaggtctagagtagggcctgaaaattggcatttcaaataggttcccaggtgatgctgctgctgctgctggtggtctgtgaagttcactgtgaaaaccacaggtacaaataatgtatgtgttgccatgacctttctctggggctgggctggggttcttcacagacaggtggacagcttgaagcagagaattgccgggaaatctatccctactgagaagtttgctgtgaggaaggctcggcgttactccgcctccttacctgcacctgtgaagctcatcttacctgccctggtatctgcttttattttcttttcatgtactagaaataaattacctactcacagcagcagggagcatatctaaatttggttatgaagtttagctcatttaaaaaccattgtaggttttgttgtaagttgaacatttctaaataaataattaataaataaaaactgtagctaatggtttttgactagttagtatgatccaggcattacgataaaggctactaaaaacgtatcattttattcttataactttttgagtatagttaactcttagccccattttttagtgaagaaatttagacagaaagaagttgattccattgaagttgagttgaattctaatgcaagccacattatgtaattttaccttttctaatagccacattaaaaaagtaagaggaaatagaaatgaatttcaagaatatattttaacccagtatatgcaaaattttgtcatttcaacatgtaattaatagaagcttatccatgagatatatacattctttcatattgaaccaagtcttagaaatttagtgtgtcttttacacttagaggacatcttagtttggtctagctgtatttccagtgctcaagagccataactggctgctggctgttgtattctagctccagctcacattcttaaactttatgccatttaggcaaggcttctgtgaaaaacacaatttcaacttgaattttcttaatgaagtgttcttcaaaaaatactgaatatatcaagttactatgactcttctggtgctttagtttttatatagatagtcagcacaggaaagctgttcagtgtaaccgatgtctgcagtcctccactctggggtttcctgagttttttttttttttttaaattcagagtttatttcatcattcctctttgacagttatttagatttttccagtttttacaattatacactgcaatgaatatcctctttttgtacatgtgcatataattctctgtgaaaggttttttaaaaatggaattcctggttcaagggaatatatacatttaatattttggtagatattgttaaattcccctcaaaaaaagctctaccaatttaaataagtactgatagtattttaccattttaatttgcatttccttgtggatgtggtggagcatcttttcatgtgtttcttcatttttattttttcttttgtaaattgttgttcatattctttcctaatttttcattgggttgttgattgttttcttagtgacttatgggagccttttatacattctatgagaaagaacaatgcagcccctccctgacaggggtcagacaggagttagcctgcgcctagcacctaggtccaggtgtttcctacctaacacaaactcagagaacttcagcatcagacaggcccattctgtgactgtgacggagcaagacaaaaatatgaccactctgtaatcgtgtctgagcacaaataaaaacaagaacactgtgtaaatcacacaaataaccaaacatctccctctcccagctcacatgagagccttctgttgcttaaccaattagagccttagctccatgcctgattcatttttattaagtgatttgcactgggaaggtttttctgtctcacagaactctacagaaaattttctagactatcatctttctttgccttaatacttagataccagtgtatacgtaagtgtatcctgctttgactgttaagaaccatagggaaggttaactccctgcacttctttctccaggtctatggaagtagaatgtacaggaaattggcttgaaatgttagtactgggatttttttttttttttttgtacctaggaattttaccaaaagcctgtttttcataaagtctcagatatgagcttgccctcttctgataaaaagattttatcaataaaaggaatttttaaaagatcatcatcaatttaaaaaagattctgttattgaattgaactcttgctctattagcagcaataaattgttacatgtaaaattgaaggtagagtgtcatgatcttagttttcggtgccataagataaagatacctttgctgccattctacttgagtgtgtcgtcctcatttccactacctcctgctaagaggcttttcaagctatatttttatcatatcttaaaatttatttccaagaagatactaattaccctgcttacttcatacccttcaaaatacgaactgcactatcaggaacattagaaaaatattttcaagcaaaagcacatttgcttttgatccaaaaaaattctcatctggtagcccattaaatataatctgtaatgagaaatcattagtttacattttaggagctgtcattcagccatatggcttttaaatgaatacgttttctgcatattggattacattactggaccgtcacatgtttctaattgtatgaaagatcctaagcccagtgaaatattccagtgtttatatccagtgatattcttggaaacattttatgtaaacaactggcagacatttaaaaatatttttctttacttaaaagtaacaacaaaagtttacattaaacagaattattattcatagtatcggtttaaaatatttatttctgtatctgtattctattaccttccaaaagaattaaatgcttgtagatatttaataaatatttgttatatgaatgagtttaaatttttggtaaaaatatatatactgaattgcttcacagtataaaaggcaaaagcaaaggaaaatgatctgtaaatattgtcctgaggttcctagaaaccgaagcaaaacacatgaacattgtttggggatcataaaggacattgaataacctcatataactgcaaatggttttcatttttcctcattaggaaatgatgtatgtctggaatggtttttcaatagtgagcaaaagaaaagacctttctgaaaatctgttagtaactgttgaaaaagctgaggcagctttacaaagtcaaagtaagtatacacagtaagcaccgaggagcctttgtctctgctccatgactgctctcctgtcttttccctgtgcacatctgccaacattaatttgtgtacatcccaaggacaaagagcttgagctgcaggggtctgggtgattgcagtcaaatgcagggaggaatgatacacactgcaactgcatgaaccttggaaacagcttactaagggaaaaaggccaggccagccataaaagaccacatattatatgattccctttacacgatactcagaatagggaaatctataaagacagacagcagatgagtggttgcctagggatggagtatggaagttaggagttatgatagctttctggggagggaggtgatgacagtgttctacagttgactgtggtgatggctgtacaactctgtgaatatcctaaaaaccattgaatggttactctcagtgggtgaattgtatggcatgtgaactgtatcttaaaactatgacaaaaaagatgaagagaggaagcccagcattggaattttagcgcagcacaaggaaacgtgcacttccctctgggttgagtttgctgtgactctttctatgcctccttattgctgtctaaccattagtgtgtttctgcagacacagggaatagttttcaaggtgaaatgttatcacgatttattctacccattacatttggttgtgctagaggccacatttcagtttaccggaagcagctgatgtggtaaaaggagtatcagaatcaggcagtctgggcttatagtcccagctctgccatcagactctgggtaacacctctgttttctcgtgaagtgggaggagtgttggaccagatgctatccaaagttgtttccttgccctgacattttttgattctgtatttttaagaggggtaaaccatgccataagtgatagcctttgttgtatttcttttcaatgccaagtcacttaggtattaccccaagagaaatggtcttttgtaatattctaaccacataagtaaaatgaaaacttctgtgatgctaaacatggtaaagggcatagaaattcaggaatggtggggaaacattttaacagttaactcatttttgttaactgtaaaaagatgggcactccaggagcccagcctactgtctatttgagcaagctcttcaccacccccagccccccattggttgggggcaaaattcgaggggaaatatattttatcagactatgctagtaaaatgcagtggaaatttggaaaaccaagtcactctcctccacccattcctttttctcttaatgacatgctgagatgataggctttagagatatttaagcagggcgggggatactgagacagacagacagacagacatgccatacttacctacagttttggctttgtgtgtcctctctctgggtgaaataattagtttattttctgaagatcacctttgccagatatttcatgtgaaacttatgatgacctcttctaggacttcttttatgcaagattatctcctgttctccttcccaccttgaactgttaggacggtttagtaattaagctcctatccttcagagcagggaagaaaaagtccataattggaaaatggagagaagttggaaaatggagagaagttggaaaatggggagaagttgtaaacctgaggttacatcatcttccaccccatcccccacccccattattggaaactggatgtgtattggcttctcctagctttgcaagtgtgtctaaagtaaaagatggtagaggatacaactgatctactctgcaatactctggccatagttattaaatgctggccattgatacaaaagatagaactttgaagacagaacagaatttggtgacatccctggagtcagcatttggtattaattccaatagtgtttcatttgaaatctaactaaattcaacatgtaaccagaagttccactttgactaatttgcttaatgaaattatatagcaaacattatgagagttatgtaaaagggaaagtgatactgactttatgactttttactttctaaatctattttcagatttttctcttggggccatttcagctagcttctaaaaatttcagcatagatactttttgtagtttgggcttcaaacttccctgtttctcagcctatccaccataaaagttcagcggatcttttgtcgtaaaattgtactctagtagctttatcatgtaattttctttgaatgttaaatggaaacatattacatgtgtgttgtgtgtcgaaatgttcatctatgaacactttcatgaggttgaaaatcatgacaaagcatttatacttcaagggaaaataatcatctgctagataatggtctgtagtcggaggaaataatgattttgccatctaaggtttttggaggaatatagtatttttgaacccagtcgccgtatgcctaactcaagttcgtcatagaagttacatgcggctttactagtattttaacttcccatgatgttacgtctgttcctcaacaaaatcatcattcacagagcaccagaatgttgtcataatacaaactgtcgatacaatgctacaggaaactcagtagaatgcacaaaaatgatactacaagctagcatccaatatggaccctttggttttggttctaggtcctaaaagatattacttcttgaatgtctgttttaacatccgtgattaaaagcaatggatagaattttattttggtagaaaaatgattctaaataaataatagaaaaggtaatgtgttattgatacccgtggttttctgggtgaatgacctatcagagcttgaaagttagaggtgaatattcagttttcagcacctaagaagtaacccctttctggttggttaagtagcattgttaatctccatagtcaagtggtttaccatcttaactgccagcatgtgttaatgatgatttctgaggtttgtgctgaaagcaggaggatttcaataggagggactcccagggcctcgtatgttccctttactgccgtcctctctactgtcacagcctgaaatgtgtaaattgtcgttctgtcttggaataacgttgtacttgcctgtaacttgcaaaaaaatttcaaaagtgtaaatgtggaatggctacctttgtcagatagatgtcacacgtaatatggttccttctgtttaacacacatttgtcttgggctgtagaaggcagagagcattttcaaaagggaaaaagtggtgaaaaaatccttgacattttcctcaagcagttagaagtttgtggagattttaggtgcctttcatgtacttcagaaccgttttgttaaatcttatggcatagttttccccaaaaagaacacaacctgggagaattgataagttgtaaacataatgatctggagagggtattctacttcctgaatttttaatggggataaggccatctgcttctccatatggaagtgttatcctctcctgtattgaagccaacacagaagccaaacaacaggaggaggcagccttcttgttcctcatggctttaccttttatagaattaataaagctctttatttagagctcagattttcggttgttgtatctaaggtcacaaagctcagagcgtgaccacctgaagaatattttaaagtgaatagagtgaactccttaataaaatgatgttctgatatagtaaattcagcactgtaggaatgtatgtgtatatcagatggggtcttgctctttcacccaggctgcagtgcagtggcgccatcatagctcactgcagcctccaactgctgggctcaaatgatcttcctgcctctatctctgagtagctgggactacaggcatgtgccatcatgcccagtaattaaaaaaatttttttttgtagagacggggtctcattgtattgcccaggctggtcctgaactcctgggctcaagtgagcttcccaccttggcctcccaaagcattgggattacagatgtgagccactgtgcccagttcttttcatttaaaataatttcattgtattttatttagtgaggcataacaaatgctaaaaagttttccttatttgtaaatgatccctctgaaactttgttctttctcttaattaagatcttaaggccgggcacggtggctcacgcctgtaatcccagcactctgggaggccgaggtgggtggatcatgaggtcaggagatcgagaccatcctggctaacacggtgaaaccccatctctactaaaaatacaaaaaattagccgggcgtggtggtgggcacctgtagtcccagctactcgggaggctgaggcaggagaatggcgtgaacccgggagacggagcttgcagtgagccgagattgcgccactgcactccagcctgggtgagagagcgagagtccgtctcaaaaaaaaaaaaaaaaaagatcttaaaaagtatttttctttgtgtgttttctttgtatgttttttgttttaagattttaacagcttctctgtggatgatgagtgcttagtgaagttacttaaaggatgttgcctcaagaacttacagcggcccttgcaagctgaactatgttacaatcatgttgtggaaaggtaagaccaaacaataaaaccagcccaagtgcaaattgtggtttctggggaattgctgtgagaaagtgatgcaaaatgcttttatctcttactgctaaactcttacttggtgttaccagaaagaaaatccagtagtgtgttgttgttgttcttcctcgtgaacaaaattatggtctgggtggaacatgactttatgtatttctacttgatgtttaaagatgacttacaaaaactgtatttatagctcaactaacaggtgtctagccaaactctggcagcatcatactgaatctctgctactcattaatttttttgttttttacatatttctttagtttttcttttcttttctttttttttaagagatgggagactttccttgttgtccagactggagtgcaagtagtacaatcatggctcactgcagcctggaactcctgagcttaagagatactcccagcttagcctcttgagtagctgggactacaagtgtgcactactatgcctggcttctgatactaatttaattcatacatttatttgtccattcatttattccatggatatttgagcacccactatatgccagagactgtgctggattctaaggattcagagctgagtaaacagacttgccatcaccgtgataataatttggcagtaaagagaggcatgtgatgagcactctgtctctcttttggcaaagggcagttcttctgtatataattgagttttgttctggttttattccccctcagtagcattgatgatgatgtcctgctccattactaaccatagagttgaatcagggtactgatgcctggcccttttctctgtatcacaaatgcagtatttacaggggccagatatgtaaccttacttaataaggccggctgagtggtggcaggaataggattggtaggctctataggtcagggtgttttctctgaagagtgtagccacactcctcagctctatttgattattgctttgcacagtgtgggcccaatagcaataatccctaccatttttcacgagaagcctggaatctggatattatgtaaaatcacctgattttaaaatattggctcaaattttttgaaaatattctgcaagccaaaacaatcacagctatagactgctggtggacatcctgtgctctgtgtcatgtgcctttccatccgtggccacctgatccccttcttcctgacagtattgatgggaatataggaggacttgtgcccctgtaagaataaagagaaaatatctacttcccaaatgtactgtctttagtaatattctgtaattagtaaacatgttaaagaaatatctattgaattctattttattagtgtttctataaggattaaaaggatgatcaaaaggatgacctattgtgctgtttttttgtatgtgaatctcatagtgaattgtttgctcatgtgctttataattgtggattgtgaactcaccttcattggagttttttcttgagattcccatgaggctatactgaagaagagttgctctacagtgattttgcattttatttctgtcaggtaccctaaaggttttttctgcccagggcctctttcatgttaatttcattgcttacttcttggatcatttagacaatgtaaatttgaattgcacattcaatgtgggcaggcctattggttattgatttcctaaggaattcttttttcttctcattgaaagtgctggccaaggagacaactgtctttgtcttcctcctttgccagtgagtgggtttgttctaacctgcctttgtcttaaggagtagtcctgtaaggatcccagctttaaatagaggtctcagtttcagctccctgctttctgtgggcccaaggcctcatctcctgcatggatattaggatacaaagcccttgactcagttggaggtagaccacagggctcattcagcatcatcccacatatgtagagtctcactttttcaattctagctgtttttggcacttgagggttttttcttatgttctggtgagctaagctatgcatttgaaatggtgttagttgtattttttttcattgcttttacatgttttataaccagagagttctcctaatagtgctgaaaacagaagtgttgaccatttctttattggccttttaaagtattataagactttaaaatacaaagggagttgaaccttagtttaaaaataatacaactttcttatttctaaatggagtcattttctgaacacatttgtgttcagaaagatgatcttgccatttctagggttaatctttaaagatccgtatgcgctgatttacttaagagacagcgatcaaccatcagtgctgggtttacattaaggaataaaagattaatataggaaaagaacattatttattgccatagtttaatgagttccataactatacaatggccgcctttctatgataatagacttagtgctgcacatgttttctgaagaatgggaataatatatatttagaaaaatgtgtatttcttgttctgttaagatttacttgattttcctctgctctttcagtgaaaagctactgaagtatgaccactacctagtgccgttcactctatttgaattggcatctttgtataaaagccagggggaaattgacaaggccataaagttcctagaaactgcaaggtaagtgttgaaggcagcttttccttgattgttatggagtcagaaatgtcagtactgctctaacaacagcagtaacattatatacttaacaattaacaatgtcaaattagtaataatgctacttttgctaacttctggttgatttatgctcatggcttttgctgtaattgtgctgtttccaaccctcttactgcctcaccctgtgactgtttacagatatgattatgggcatctatttgaaagatttctaacttattttattctatatcaggggttggccagctttttgtgtaaatggctagatagtaaatatttttagctttatagcataaagtctccattgcaactactccattatatcaaaagaagtcatagaaggtaatatgtaaacagatgggtatgtttagatttggcccttgggtcctagtttgccaaccttcattgtattcagccatacctattatttccttgaagagccattgatcttgtgaagcttgcagatcttacccagactctgttttttctgtttattgcggcagtttcaaagtatttttatcaattctggtagacaatagcttttagacctgtggtcatggatcacttaggtaaggcaaaaaccctgtggcctgtttgccttgaacactttctgcagtagagaaagaatgccagactagctctaggtcataaacagtgatttgtccatttattcaaattcagcagttattcactgagcacctattatgtgtcagacactactagtaaaggctttagagagacaactataaactaagcaggcaatacttctgctctgttagccagagggagatactaaatagacaagaaaaatatcagtggtatatgtttgctgagatttataatatgatacatggtgcctgggtgttacttcaggatagattgattctgaaatatttccttggggaaatgatattgtagctgagatttgcataattaaagccaatcttgagatcagtcatcagaaatcaaccaactaggtagggagcattcctgacagaagtcacagttagtgaacatctgcattgaggaggttgagccactgggtcaatgatgatgctttctgctgtgctggggaatacttagaagaatgtatttggggagagaacgaaacatacttctgttcagaccatgattctttaagatggctattaggtactcatattaggtagatggcaagttggcgttcatacttagcatgaagttcagtgataaggtcagggctgaatgtagagattgcagtcaacagcacagagacagtaatatttaaagcaatggcgtgtgatgaagtcattttgtgaatgttatatagctagagaaagaggtctagcacaatgtctgggatatgccatcttcttagacattaaatgataagattaagaagattaagagagttaggaagacatctaggaaagccaaccaaatagtgtttcaaaaagaagagcatggtcagttatgagggcagcaactaagaggtcaaacaagttaagaccagaaaagtggctgctgaatttggcagcatgagtatcattggtgaccttgacaaatgaggtgacaaacaaaatggagtccgctactttaggcaactcttttaggatgtttgctgtgaatagaacatcgtaatggggcaaaagctttacgggcatggtagagccaagaagggcttccttaaaatatttatatataggtgatatgagagcaagttgcttttaaagttaatttgttgggagtatgaccaatatttcatgtgttagatatagatatcttcaaatccagctattggaaaattatggattataaatgctgctgttccaaatattcattatttgaatatacaatgtataataaggcaactttataagataaaaataaaagactagtaactcactgctaaaaagcaatgaaaagcctccactaactcaagacaatactgacaattcaaacataaagatacttcccagtaattccaagactattatctgcactttccctttatgcattaggagctttgcaaagttgcccacattggtggcatttaggaaaatactcaattccatctgtcggtaaactccagtaacatattgattttagtttatgaataatacattttactaacccacatcaagattaccagtgagtagcccttatacctgttcaaaatgaagggctatagaaataagtgccactgtaaagaaagcagttatagctcacccatgggccaaggcagtatgtaaaagtattccatttttctgattcttaacaattctggtaaagggaggtcaacataaatgctcttaggcaggttttaaataatctttggatttctatggccccctttaaagacattggcctaattcttatgtaattattggccaaaccattgatatttacatgtgagaattggaataagtaattttgacgtcattaagtaattctgctgcctttgttgcagttgtttcatttgagtttcttgagtgatcgatcatgtgatcatgctaaccatgtttatatgcacctaccttaaaattttccaatttaaaaaaggaagtctaattatttaggactagttcacaaaatttgtacagcccttctcacaacttcttgctatgcttgtgaatgatttggtaattaagcagaaccttgctactcaaagtatgacctttagatgaccaccaggaagcttctagaaatgcagattattgcagttccccccaaaaccccccaacagaaccagaatctgcattttactaagatctacggttatgtatattagagtttgaaagtaagtaagtagatcagagagaggaatgggagagtggtggtacctggtatataaggaaattttgactgtacaattttattgttattgtcttcaggaacaactacaaagattactccctggagtccagactacacttcagaattcaggcagctcttcacctctggagaaaaccttcctcagattgatcagaacttgaaggatggaatttttcctcaattagcatcggcatctgctatagattcaaccttatattaaagtggaaaaatgatcttgtgaataagagacaaaaaaacagtttttttggtcaatattttctatcatctgagagatttactgttggtctacataattttttttcctatggaatggcattctatattatctagaaaattcttatattttgcctcccccaaaagaatttcatattatttgaattagggggcgaagaagtcttttgaaagacttgcagatgcaatagtctaattagattatttatttttttaatgtgaaaattaatattgtttagcaaatagcttacaagttgagccaattttggatttgttgggtagttaaacttcagagatattttgttgcctgtatttaaatttcagaagataaataaatatcattgcatttaaaatagcttaacagtgaccttcagaagacttctgaaaaagacagtctgagaacatgaacacggatcgatataatgtacttcatgggttgaagagacctttctctataaaggatgatgcagtattcagttagtggttttttactcttcatttgattaaaggtggtgacgttttggagagactgattttgaatgtacttaagtctattataataacaaaattcaaaacccctgtgtatctaaagggaaggaagtgtcatattttaggaatttttcttaaccttagcaatgagagcctaaaatacatacatggattatttttcttctaggaagtaaatttcctgctgctttaaatgatatgtaaaatatcaataatttttacacttaagatgttggtaagacctagttttctaatctctctagcactgtgatgtctccttgtagataatctggaccttgcttagtcctttagttgggaaacagaatcagggcatagagcagaagagagcttgacactccatatggtcctggttctgctacccattagcgattagtgaggagacctttagggagtccactgtgccctgtgtgtcaccacattttcttctgtgaaatcaagattaaagaacagatgactttcaaggtctttttcagttttataactgtgagtctatgtattaggtatttattttcaacaaatgactttaaaatgtcgaatgcaaaccattcccacttggagtgttttatttttcaatcatcatcattgcccccaactccccacatgtatgtgttgtggcatccagagtgagaaaagacaatttatgagttgatgaatctgggccttatttctatttccattttgaagaataacttgtcatagaagcctctgcagtttaacagaaggagccacatattgggagtcacgagttcatctctgtgggttaatagttccatgacacggagtacgtagctcagcttttcaggggttcagttgccccactatggatagcggtgtggtatttggtacttgtgagggctcaattagataaaacatatgatagctttttgtaaactgtaaaaggctatacaaaagtatgaattattataataattatggttttttatgtctggattacagtatcaacacaaaagtattggctgatactgtggtttgtgttgtaaaatgaaagaagtgtagaaattcaaataccttactgtgtattcatgtgtttgatgttgacagtaggctacccaggttatatgaacctgctcctgccgttccctgccacatggacctgtatcaagcagtgtgtggcttgttttcttcaaggtactgattcttgaccaacactgaggatgtatatccaatgaaagatagatatcaatggcggtagatatcaatgtgttattagtaatacaactttaggtacagacaaaatagaaaataaaattaactgtcattataattagtagtggaaaatacattaaaaattatttgtgtatagctttggaaaaaagttttccaaaaaaagctttttggaaaaaagctcttagaagagctttggtaacattatttttgaaagcgcacactcacattgtgactgtgggtatactgagcatatattcttacattgttactgtgagaagctgcaagtcagtgctgcaagtcagtaacaaattctcttttggggataaaatgaaacagttttaagcttagagtggccatttttattttaactctgcattactaaacaaatataaaagaaattcatctccatttaaaaatcttttttgttatttatattttgttttatttttgtttcctattctttatgcagttacctgatactatggacagtatatccagtggatcttttagtactgtaatatcaaaatgctacaaatatttatgtttcctgctatgttcaagatattgtagtggcaccaacttcttgggcatcagctaatattgcattttggagtcattagggtgttctgtgaagaatgaatactgaagtgacagttttatctagttttttgaggggcatttatgatggggttgggttgccattgtgtctgacagtgcaattcatgtagttcctggcataattgccttttttttttccttaatggagaggcagggttctgattggtgctgtataaatttaagtaactttgtgctttgtaggaatggtgacaaggaaggcatgatttccccctgacaaggaatgaaaggtgaactgtatcagctcttatctggacatatatgttaatgttttctatgctccctgatacaagaagtttccaagttatataggaaaattaagtccattgatcctgtctttatcctcagagggcagaaatgagacaagtggataaaggctgtaggaagctgaattccagattaatcagtgccgaggaagatttttcattatcggaaaacccaacagtctaaaatcaataaccagttcttctgcaaaggggtgagtttaagcagggctaatgtgactgtcatttctgcctgtcctgcaagcttagactagttgaactttgaggtcactctatgattcttttattagggcttcaaatcagcagggagtgtgtaaagaaaaaatgctccccccctaccatttcaaataaaagtgaatgttttctctttcaaagctactattagaggtagttgtgatagacactaacaatccccggtgttaatactttccactccttttattttattttaatttaatattattttattgagacagagtctcgctctgtcacccaggctggagtgcagtggcgtaatctctgctcactgcaagctcctcctcccaggttcacgccattctcctgcctcagcctcccgagtagctgggactacaggcgcccgccaccacgcctggctaattttttgtattttgagtagagacggggtttcaccgtgttagccaggatggtctcgatctcctgaactcgtgatccactcctttttaaagtgagtctagtctgttgatcttcataaataggagggttttcctccagcttggacattaaaaataatttttaaaaagatctttgtggctaactggaaaatcttctggaattatctaatgcttcattcatttccctccatttctgttttttttttttgtatttatactctgcatatttagaaatcttaaattcaaatacatttagttaaaatgagttgacgaagactccagtgatgttttaataccctaagattttgtgattccttgggcctggaatggatcttagaaaattaccttgccctcatgagcctgtaaaccgtgttgtttcccctcagtcttgctctgtccagtacagtagcccctcgccacacatggctgcggagcacccggaatggcttacagcacatgtgggaatggtgctgaatgctgaggaagcattcactcatacgtgctgcacttcttaaaggcctcccaatagcctgctttgcggagttctggcttttacttgctgtctactatgatcacctgatttgtgcttcacatacatatctgtgaagtttgctttttctattta

SEQ ID NO: 16 - DNA, 20 bp, Artificial Sequence
  synthetic oligonucleotide
ggctctgggttcagcccagc

SEQ ID NO: 17 - DNA, 20 bp, Artificial Sequence
  synthetic oligonucleotide
ccgcacacccacagggaact

SEQ ID NO: 18 - DNA, 20 bp, Artificial Sequence
  synthetic oligonucleotide
tccactcggctgcccacgag

SEQ ID NO: 19 - DNA, 20 bp, Artificial Sequence
  synthetic oligonucleotide
tccaaggcatcttcaaagat

SEQ ID NO: 20 - DNA, 20 bp, Artificial Sequence
  synthetic oligonucleotide
gtccgatggagatctagaga

SEQ ID NO: 21 - DNA, 20 bp, Artificial Sequence
  synthetic oligonucleotide
acaaagtgaaagccgctggt

SEQ ID NO: 22 - DNA, 20 bp, Artificial Sequence
  synthetic oligonucleotide
tccaccttggctgatgaacc

SEQ ID NO: 23 - DNA, 20 bp, Artificial Sequence
  synthetic oligonucleotide
gacagcctgcaacaccacaa

SEQ ID NO: 24 - DNA, 20 bp, Artificial Sequence
  synthetic oligonucleotide
atgccattctggatgtcctg

SEQ ID NO: 25 - DNA, 20 bp, Artificial Sequence
  synthetic oligonucleotide
tttggcaggtttgtaaagcg

SEQ ID NO: 26 - DNA, 20 bp, Artificial Sequence
  synthetic oligonucleotide
tcttcactcagttgttccag

SEQ ID NO: 27 - DNA, 20 bp, Artificial Sequence
  synthetic oligonucleotide
tcatattttcatcctgcaca

SEQ ID NO: 28 - DNA, 20 bp, Artificial Sequence
  synthetic oligonucleotide
gagtccacctttgatgaagt

SEQ ID NO: 29 - DNA, 20 bp, Artificial Sequence
  synthetic oligonucleotide
ggcactctttatatatttgg

SEQ ID NO: 30 - DNA, 20 bp, Artificial Sequence
  synthetic oligonucleotide
ccccgttccaagcttgactc

SEQ ID NO: 31 - DNA, 20 bp, Artificial Sequence
  synthetic oligonucleotide
agcatcaaattaaaggcccc

SEQ ID NO: 32 - DNA, 20 bp, Artificial Sequence
  synthetic oligonucleotide
cggatgattcttgctggtaa

SEQ ID NO: 33 - DNA, 20 bp, Artificial Sequence
  synthetic oligonucleotide
tgtttccagaaaatccaata

SEQ ID NO: 34 - DNA, 20 bp, Artificial Sequence
  synthetic oligonucleotide
gcgccttcccggagctgcag

SEQ ID NO: 35 - DNA, 20 bp, Artificial Sequence
  synthetic oligonucleotide
agtatgagggagccatttgg

SEQ ID NO: 36 - DNA, 20 bp, Artificial Sequence
  synthetic oligonucleotide
gcagctcgattcgggcatga

SEQ ID NO: 37 - DNA, 20 bp, Artificial Sequence
  synthetic oligonucleotide
tcgaaatgtttcttgagcct

SEQ ID NO: 38 - DNA, 20 bp, Artificial Sequence
  synthetic oligonucleotide
atccacattaattcccagta

SEQ ID NO: 39 - DNA, 20 bp, Artificial Sequence
  synthetic oligonucleotide
tagtaatacgcctgcatcca

SEQ ID NO: 40 - DNA, 20 bp, Artificial Sequence
  synthetic oligonucleotide
gttgccttggaccatttact

SEQ ID NO: 41 - DNA, 20 bp, Artificial Sequence
  synthetic oligonucleotide
gcagctttcaagaacacata

SEQ ID NO: 42 - DNA, 20 bp, Artificial Sequence
  synthetic oligonucleotide
tctggaagcatgctcaaaat

SEQ ID NO: 43 - DNA, 20 bp, Artificial Sequence
  synthetic oligonucleotide
catcatttccagggctggca

SEQ ID NO: 44 - DNA, 20 bp, Artificial Sequence
  synthetic oligonucleotide
cagtaaagtcttgattctgc

SEQ ID NO: 45 - DNA, 20 bp, Artificial Sequence
  synthetic oligonucleotide
gctcagcttgcaagggccgc

SEQ ID NO: 46 - DNA, 20 bp, Artificial Sequence
  synthetic oligonucleotide
gtttttcactttccacaacg

SEQ ID NO: 47 - DNA, 20 bp, Artificial Sequence
  synthetic oligonucleotide
ttatacaaaaatgccaactc

SEQ ID NO: 48 - DNA, 20 bp, Artificial Sequence
  synthetic oligonucleotide
aggaccttgatggccttgtc

SEQ ID NO: 49 - DNA, 20 bp, Artificial Sequence
  synthetic oligonucleotide
tccagagatgaagagctgct

SEQ ID NO: 50 - DNA, 20 bp, Artificial Sequence
  synthetic oligonucleotide
gttccggatcagtccgtgga

SEQ ID NO: 51 - DNA, 20 bp, Artificial Sequence
  synthetic oligonucleotide
ggcagagtataagaatttct

SEQ ID NO: 52 - DNA, 20 bp, Artificial Sequence
  synthetic oligonucleotide
ctttattgtacctgccagtc

SEQ ID NO: 53 - DNA, 20 bp, Artificial Sequence
  synthetic oligonucleotide
gccaatctaaaaatggctca

SEQ ID NO: 54 - DNA, 20 bp, Artificial Sequence
  synthetic oligonucleotide
aaaatatctctgaagtttaa

SEQ ID NO: 55 - DNA, 20 bp, Artificial Sequence
  synthetic oligonucleotide
agatacaagtcccttctgcc

SEQ ID NO: 56 - DNA, 20 bp, Artificial Sequence
  synthetic oligonucleotide
aatgccaccaccttcaacca

SEQ ID NO: 57 - DNA, 20 bp, Artificial Sequence
  synthetic oligonucleotide
gagtacattcaaatacagga

SEQ ID NO: 58 - DNA, 20 bp, Artificial Sequence
  synthetic oligonucleotide
tgaatgctattattggatct

SEQ ID NO: 59 - DNA, 20 bp, Artificial Sequence
  synthetic oligonucleotide
gcagccatggccctgggtca

SEQ ID NO: 60 - DNA, 20 bp, Artificial Sequence
  synthetic oligonucleotide
ggtggagtctggccctcagc

SEQ ID NO: 61 - DNA, 20 bp, Artificial Sequence
  synthetic oligonucleotide
gccaccagtgcctgctgagc

SEQ ID NO: 62 - DNA, 20 bp, Artificial Sequence
  synthetic oligonucleotide
tatttctatagctcatgaca

SEQ ID NO: 63 - DNA, 20 bp, Artificial Sequence
  synthetic oligonucleotide
tacagaccatgagctttgat

SEQ ID NO: 64 - DNA, 20 bp, Artificial Sequence
  synthetic oligonucleotide
ggactgcctgccatgggtgc

SEQ ID NO: 65 - DNA, 20 bp, Artificial Sequence
  synthetic oligonucleotide
acagtatcttgaacatgaca

SEQ ID NO: 66 - DNA, 20 bp, Artificial Sequence
  synthetic oligonucleotide
ttcttacaaacatcctaaga

SEQ ID NO: 67 - DNA, 20 bp, Artificial Sequence
  synthetic oligonucleotide
ccagacagacactcagacca

SEQ ID NO: 68 - DNA, 20 bp, Artificial Sequence
  synthetic oligonucleotide
cctgataaatcacaaatgct

SEQ ID NO: 69 - DNA, 20 bp, Artificial Sequence
  synthetic oligonucleotide
ggaggtcccctggccacggc

SEQ ID NO: 70 - DNA, 20 bp, Artificial Sequence
  synthetic oligonucleotide
gactttgagatggcacacaa

SEQ ID NO: 71 - DNA, 20 bp, Artificial Sequence
  synthetic oligonucleotide
gacttttaattcaaagtcct

SEQ ID NO: 72 - DNA, 20 bp, Artificial Sequence
  synthetic oligonucleotide
cgtgtcatttattaaataac

SEQ ID NO: 73 - DNA, 20 bp, Artificial Sequence
  synthetic oligonucleotide
ggtgcccggaccagcccgct

SEQ ID NO: 74 - DNA, 20 bp, Artificial Sequence
  synthetic oligonucleotide
tgtcagtgacagtggcagct

SEQ ID NO: 75 - DNA, 20 bp, Artificial Sequence
  synthetic oligonucleotide
aaagaggagtccttccttaa

SEQ ID NO: 76 - DNA, 20 bp, Artificial Sequence
  synthetic oligonucleotide
agccttgttcactgggaaga

SEQ ID NO: 77 - DNA, 20 bp, Artificial Sequence
  synthetic oligonucleotide
gccagccagggcaggcactc

SEQ ID NO: 78 - DNA, 20 bp, Artificial Sequence
  synthetic oligonucleotide
actcagtcatacttttggca

SEQ ID NO: 79 - DNA, 20 bp, Artificial Sequence
  synthetic oligonucleotide
gagatcagtttctgatgaaa

SEQ ID NO: 80 - DNA, 20 bp, Artificial Sequence
  synthetic oligonucleotide
gaattatttattctcacacc

SEQ ID NO: 81 - DNA, 20 bp, Artificial Sequence
  synthetic oligonucleotide
atcatattttcatcctgaaa

SEQ ID NO: 82 - DNA, 20 bp, Artificial Sequence
  synthetic oligonucleotide
ccttaccaaattaaaggccc

SEQ ID NO: 83 - DNA, 20 bp, Artificial Sequence
  synthetic oligonucleotide
gtttcttgagcctataagtc

SEQ ID NO: 84 - DNA, 20 bp, Artificial Sequence
  synthetic oligonucleotide
gcttaccttggaccatttac

SEQ ID NO: 85 - DNA, 20 bp, Artificial Sequence
  synthetic oligonucleotide
tccagatcattatgtttaca

SEQ ID NO: 86 - DNA, 20 bp, Artificial Sequence
  synthetic oligonucleotide
tatggagaagcagatggcct

SEQ ID NO: 87 - DNA, 20 bp, Artificial Sequence
  synthetic oligonucleotide
tccggtgcgcacccagtacc

SEQ ID NO: 88 - DNA, 20 bp, Artificial Sequence
  synthetic oligonucleotide
gcccatgcacgggtggagga

SEQ ID NO: 89 - DNA, 20 bp, Artificial Sequence
  synthetic oligonucleotide
ttccagctcggctgcgccac

SEQ ID NO: 90 - DNA, 20 bp, Artificial Sequence
  synthetic oligonucleotide
ggagatgtgtgtacggcagc

SEQ ID NO: 91 - DNA, 20 bp, Artificial Sequence
  synthetic oligonucleotide
tgtccgatggagattgttaa

SEQ ID NO: 92 - DNA, 20 bp, Artificial Sequence
  synthetic oligonucleotide
cggagatcagtttcttcact

SEQ ID NO: 93 - DNA, 20 bp, Artificial Sequence
  synthetic oligonucleotide
ctgatgaacttgatttagcc

SEQ ID NO: 94 - DNA, 25 bp, Artificial Sequence
  primer
catctctagatctccatcggacatg

SEQ ID NO: 95 - DNA, 20 bp, Artificial Sequence
  primer
tgtctggaggtccgtttggt

SEQ ID NO: 96 - DNA, 27 bp, Artificial Sequence
  probe
caccagcggctttcactttgtaccatg

SEQ ID NO: 97 - DNA, 21 bp, Artificial Sequence
  primer
ggacttggtaggacggaacct

SEQ ID NO: 98 - DNA, 23 bp, Artificial Sequence
  primer
atcctcatcctcgtcattcaaag

SEQ ID NO: 99 - DNA, 24 bp, Artificial Sequence
  probe
aggcccagacctgtaaaggcgaag

SEQ ID NO: 100 - DNA, 23 bp, Artificial Sequence
  primer
actctgggttcaaccgttagtca

SEQ ID NO: 101 - DNA, 22 bp, Artificial Sequence
  primer
tatcccagaagtcccgagtcaa

SEQ ID NO: 102 - DNA, 20 bp, Artificial Sequence
  probe
ctgcaggaacggctgggccc

SEQ ID NO: 103 - DNA, 20 bp, Artificial Sequence
  primer
tgacaacgacaccgtgtcct

SEQ ID NO: 104 - DNA, 19 bp, Artificial Sequence
  primer
atgcgacttgtcaggctgg

SEQ ID NO: 105 - DNA, 23 bp, Artificial Sequence
  probe
cgtggagaaccgcagcctccatt

SEQ ID NO: 106 - DNA, 19 bp, Artificial Sequence
  primer
accgacttcaacagcgtgc

SEQ ID NO: 107 - DNA, 19 bp, Artificial Sequence
  primer
ggctgtcacacttgctcgc

SEQ ID NO: 108 - DNA, 25 bp, Artificial Sequence
  probe
aggatgggacacgcttccacagaca

SEQ ID NO: 109 - DNA, 19 bp, Artificial Sequence
  primer
gaccgcagcgagtacacca

SEQ ID NO: 110 - DNA, 19 bp, Artificial Sequence
  primer
tcacctccgtgtcgagagc

SEQ ID NO: 111 - DNA, 27 bp, Artificial Sequence
  probe
tctgctccccaacctgaagaatgtggt

SEQ ID NO: 112 - DNA, 20 bp, Artificial Sequence
  synthetic oligonucleotide
ccttccctgaaggttcctcc

SEQ ID NO: 113 - DNA, 19 bp, Artificial Sequence
  primer
tgtgcgtcatgctgttgct

SEQ ID NO: 114 - DNA, 23 bp, Artificial Sequence
  primer
cctcgatgttgacattcccagta

SEQ ID NO: 115 - DNA, 30 bp, Artificial Sequence
  probe
tgttatcacaccttcctcaccttcgtgctc

SEQ ID NO: 116 - DNA, 2343 bp, Mus musculus
ctccccggccgccgcgtcgctgggatccggccgcagcacctgggctgcgcctggcgtccggcgcgcgcagcgatgaccacggccagcggcccgggcgacctgccggcggggtctcctgtgagcagcctccatgaggccctggaccagtgcatgacagccctggacctcttccttaccaaccagttctcagaagcactcagctacctcaaacccagaaccaaggagagcatgtatcactccctgacgtatgccaccatcctggagatgcaggccatgatgaccttcgacccccaggacatcctgcttgctggcaacatgatgaaagaagcgcagtcgctgtgtcagaggcatcgaaggaagtcttctatgacggactcattcagcaacctggtgcaccgtcctaccattgaccagttcacagaagaggaaatccatgcagaggtctgttatgcagaatgcctactacagagagcggccctgaccttcctgcaggacgagaacatggtgagcttcatcaagggcggcatcaaagtgcggaacagctaccagacttacaaggaactggatagcctcgtccagtcctcgcaatactctaagggagagagccacagacactttgaaggaggggtgaagcttggcgtaggagccttcaacctgacgctgtccatgcttcccaccaggattctgaggctgctggagtttgttgggttttcaggaaacaaggactatgggctgctgcagctggaggagggcgcaaccggacacagcttccgtgcagtgctgtgcgtcatgctgttgctgtgttatcacaccttcctcaccttcgtgctcggtactgggaatgtcaacatcgaggaggcagagaagctgctgaagccctacctgaaccgataccccaagggcgccatcttcctgttctttgctgggcggattgaagctatcaaaggaaatattgatgctgctgtccggcggtttgaggagtgctgcgaggcccagcagcactggaagcagtttcaccacatgtgctactgggagctgatgtggtgctttacctacaagggccagtggaaaatggcctacttctacgccgacctgctgagcaaggagaactcctggtccaaggccacctacatctacatgaaggctgcctacctcagcatgtttgggaaggaagactacaagccattcggggacaatgaagtggagttattcagggccgtgccaggcttgaagctcaagattgctgggaaatctctacccacagagaagtttgctatccggaagtccaggcgctacctctcccccaaccccatctccttgccgatccctgctctggaaatgatgtacatctggaatggctatgctgtgattgggaagcagccgacactcacggatgggatgctggaggtcatcaccaaggctgaagagatgctggcaatgggcccagagaatgagtactcagcagatgacgactgcttggttaaattgctgaaaggcctgtgtctgaaatacctgggccgaatccaggaggcagaggagaatttcaggagcatttctgccaatgaaaagaagattaaatatgaccattacttgattccaaatgccctactggaactggccctgctatttatggagcaaggcagaaatgaggaggccatcaaactcttagagtctgcaaagcaaaactacaagaactactccatggagtcaaggacacattttcgaatccaggcagccacactccaggccagatcttccctagaagatggcaacagatctctagtctcgtcagtgtccttgtagctttctgcagcactcttgggctgcacgatgaacagacagctagctggacagagcacctggaaacatttctaaagatcacctcccctgccctgcccttccttggggtccacctggtgctccagtaggattgcacaagaatatctgtgcagaagcaaagacagcatttttaccagtgtggccaaagccttcacacatacgggtacttgttttacactgtgatgtttaagagaatgtatgaacagtttacatttctttagaaatacatcgatgggattataattggtgtttaaaaaaccaaaccaaacaaactaccccccccctccaaacaaacaaaagcaacccgactgcctggaaagctgtttagctcctgacctggaagttctctacatgctattaaaggccacactgcttctcagacctcagcttttgaggacaggggttcctagcatctgagtcattgcaaattccaggacagccacagctacgcagtgagacactgggtccaaacaaaataaagcaaattaagttgctaacatttaa

SEQ ID NO: 117 - DNA, 44000 bp, Mus musculus
aggccacatatagtgatcctgaaggatggtgtgaatagtgtgtagtagtcctgaaggatggtgtgaatagtgtgtagtggtcctgaagtacagtgtgaatagtgtatagtggtcctgaaggatagtgtgaatagtgtgtagtggtcctgaaggatggtgtgaatagtgtatagtggatctgaagtacagtgtgaatagtgtatagtggtcctgaagtacagtgtgaatagtgtatagtggtcctgaaggatggtgtgaatagtgtatagtggatctgaagtacagtgtgaatagtgtgtagtggtcctgaagcacaatgtgaatagtgtgtagtggtcctgaaggatggtgtgaatagtgtgtagtggtcctgaagtacaatgtgaatagtgtgtagtggtcctgaaggatggtatgaatagtgtgtagtggtcctgaagtacaatgtgaatagtgtgtagtggtcctgaaggatggtgtgaatagtgtgtagtggtcctgacgtacagtgtgaatagtgtgtagtggtcctgaaggatggtgtgaatagtgtgtagtggtcctgaaggatggtgtgaatagtgtgtagtggtcctgaagtggagaagcctaggggtcctggctgtgttcttgtgggttgtggaggaaatgaggaaggaaggcaggtctgacatctcgcaggcatgacaagtgtcccgactggtgaggaagggactgagacttgggaaggtaatcctcaggctcagttgttggctcaacatggccctaagcacatgatccaagctgggtcacctgggctgggaggaagaagcaataatgagccgaagctgggccagaactcttgaggacctggaccagccttggggactccccatttactcactggatgtctggctccagcttgaggaccactgtggtgatgggggaagagttctgactctgctgctgaccttgctcaactgttctcatctgtaaaatggggagaagtgcagagtccatctccaggcaccagcagtaccgctgtgctgcatgccaggcctctccgtctccgtctccatgtgcacgaactcttgctgctcacagggaagtaggtagggttatttccatttccctctgcagaaactgagcttcacagagcagttaaaaatgaaggttggccaagattacaagcatgcgtggcttgtaagtggcctttgacatgagtcagccattgctaagctgactccctcagagggagctgggacctccctgaagccagtgttcactgtcagccatccataggcagaaacacagtgacgatcagactttaccgtaccttgagagatgtccacgagagtcacgtacaggcatctcttcctgctccttccccgtgtcatacacagtgtcacccacaggagttagggctgctcactggaggcaagagatgagagtctgggacccagccaggaacttcctgggagaggtgacatctgaactgatacaagttcttaataaaaatagaattttttttagccaggctaagtagaatcagaactaatggagcttagttgcttcaggaccacttacctggcctcttctgtcattccaacaaggccctgaatttttttactttagcaatctgttgtgtctacctatcccccgtgctacctttcatgctgtctgtccatttctttttttaaaggatttatttatttatttatttattttatgtatgtgagtacactgtagctgtacagatggttgtgagccttcatgtggttgttgagtattgaatttaggacctctgctcactccaattggccccgctagctccggttggccctgctcactctggcccagagatttatttattattatacctaagtacactgtagctgtcttcagacagcaccagaagggggcatcagatctcattacgggtggttgtgagccaccatgtggttgctgcaatttgaactcaggacctttgtaagagcagccagtgctcttaaccactgagtcatctctccagtccctgtctgtccatttctcatatagcctagctagcctggaagcccttagccttagctaaggataactttgagctcctgcaccttctgcctctacctcccacgtgttacaagtgtgtagtgttgtgaaggactgttttttcttttgaagagagacctttcagtgataagctgttggctccatccctggttccatggatgaattatgtgaccaggaaggagtgtgtgtcctaggcaaaagaaacagcatgtacaaatgcccgaggacatgactgtgtggggcgtgcgacaggcttcagcctcatcacctaggactcactcgtctctacactgttctcttcagaaccacagaccccagcattcatcagtgtgcccttacccactcctgtgcctttgtctatattggtccctcatggagcacacctgctcccagcttcattaacgcacttctcaaggctcagctcccatctgctccggacagacccttcccccccccttcccccttccccaacatactcaccctcgtctgggttccttaaataatggttgctggtacatgctgttgtggtcaggttcccatcatcgtcttttcaagcccatatgtgaggctaccaaagttgggatagtttccacatagcagtgcctggcctctgctcacacagagcagcataaggacatcctgggaaatagctcagcagtcaagagcattggctgctcttccagaggacagaggttcaattcccagcacctacatggcgcctcacaatgtctgtaactccagctccaggggatgtgtcactttcactctggcatagctgcaggcaaaactctaatacacataaaaatatttttaaaaagaacaacaaacaactcacagtctttccaggcagttatcttgatgagagcagcaatcccccagacatttctccctattcctaaactcaagttgcctggctcctctgggatctgatccaagtccttcccaccatggctgcatttgcaggctgctcttttttgcttcctcttctgacatcctggagctcagggccaatccctcctcctgtcccttgcctttctaaagggacagctctaatctaatggcagccacgtgttatgatgagtcaccagagcatctggggcccagaggtagtggccggttaactcttaatgggccagggctctctgctagaagatcatgtgggcttcttcggaacctgtctcaggtctaagtgcaaagtgggcatctgggggatggaccactcactctggaagtgagagaggagggggccaaagggagaaggggctgagtgtgagctttggagttaggagggctaagttgcagttcctgctggccacttactgtagagtggctctacacaggtcacatgaactcaaccgctcgagttttcgcatctgaaaaaaaaaaaaatggcaattttagggattgtttgagaaggagagtgtgagctgcctgctagcggtgcgtgctaacccgcccgctttcccgccttctggtctcttgcaaaacactggccccgtttgggcaagcggttagaatgaatgtccacgcctgtctgcagaagctaggctttctccgctaacatggcccggcagtgaggctggaccgcgagatctcaggtgtggggccgggagctgaggcctagggaaggtggagaatttcccagcccgagtgggtggaggtgttggcagctccggtccatgtctgcgccgatgctccaaggccaggctgtgccgaccttgagcgcccgggtcccacctggccagcgccaggggcgggcgctgcgctgcgcgggcgcggccatggtcccactgcgcgggtgggcagcccgagaccggcccggccccgtcgccttccccgccccccggcgcgcccctccccggccgccgcgtcgctgggatccggccgcagcacctgggctgcgcctggcgtccggcgcgcgcagcgatgaccacggccagcggcccgggcgacctgccggcggggtgagtggcggaggccgcctcggggcgcgggccgtgcagggcgaacgctgcgggggcctcctaggaggagccccgggaccgcactgcggctccagccgctgcgcagcctgcagcccgcgccccgctgcctcctggggaccctggctcagtcacaggccttctgggtcccaactttctctccctcctcatggagtctatacccatggggtgggccttgttacgatcacccttctttacagatgagaaaactgaggcatagctcttaagtgactttgattatccaggaggtaagagtggaaagtgagatttgaacacagctctgtctggtgacatcccctttagggatatttggggtatttgaagggctctaagtgtgctcgggcccagggtattgggtgtaccaggaacctaggttgtcaaggtgggtgctgtcactatcaacatggctgtcttggccagccccacccccacccctccaaagtcacagtcagaccccctaggttgatcccgggcactgccagttgctgtctggagatagtcagcagctctgctgtgtttgggtttcagtgcttagggggcagttgctgggatcctaggctgctgggaggttgctgggcagagagagatcctgctcaggtgagctgggaggggtgcctgccctacctggagactcagactagtgacaatatttgccaagggcctgaggcctgacagatgaacagggaggagagaaaccaccagccagctggaagcctctagtgtgggtctgagagaatggtagctcggtgctgaggaacatcgtggctggaggaagtcacctgttaagttttcccctaatcattttctgttgtataattttggtcaaggcatttgaccaaacctccctgacttctggttcctgctttggaaaacacagagaggctgggttagctacgctcttcctgctgagggttgaaagctccggagcttggctgactacctttctgcgcagccctgtccgaacaccacccttcagtattagaagcgtggttttcaggagaaaaggcagacatggaacaaggcttccatccacaaacccagacttgctggctgaaagccagactcgtccctcttgcctatataccacagctgtgcctgagtccctggaagaaccctgggtacctctaactctgctcccagcctccaggccagtaagcacaaagttctaacaaaaaacagaacatctgtgttcctgtatgcctgtgagggcccaatctttgtgctcacacaggcccatttgtccagtcccctgcttctggtcagtgccatccttgtgggatttgagaagaaaaccaaagtagaagcaaatcccgcttccatctgtagacacttagtctcaacaaacactcagatcttgtctgggtataactgtaataaagttttatctaccatataacaatactttcttggcagtggggacagggtgggttaagacagggtctcctgtagcccaggctgctggtgtactctttgtgtacccaaggatgacctttgaactcctcatggtcccatccctacctcccaccagctgggactacaggcatgtgctaccatgcccagttaacaaatgtgaaatgtgaaatgtgcagggcagtggtggcacacacctttagtcccagcacttgggaggcagaggcaggtggatttctttctgagtgcaagaccagcctggtctacagagtgagttccaggacagccagggctacacagagaaactctgtttcaaaacaaaacaaaacaaaacaatgtgtgtgtgtgtgtgtgtgtgagtgtgtgtgagtatgtgtgtgtgaaatgtttttaaggcttcagaagaatggtaaataattctaaggcattttgatttttaagttatgtaggcagaagagggcatcagatcccctgcagttggaactatgggcagttgtgagccatcggtgagggtcctgggaaccagactctggccctccatgagagcagcacttaaccactaagccgtcctctagcctctgtggtaaagccctgggttcttgtcaccctgtgttgccagatactgtgttccacgttctctatcctccttttaagagagaagtcctgttagtgaaaccctctggaacacccccacccaccaccttcctctccagagataattgccagcctgagtcttaagtttattgttttccatttttattctcctgctgagtatgggaaaatctaaaagcaatccagcgtggggtggggggggttagtctgctcttacttccaagtgttctgtaacagagcctgcagcaaacacccgatctgtggcttacttttctaaaagtttggtttctgaggtttttgcctccttgggcccacacgctggtccccctcaccctggcacctacttcaccaccctgtgtaaagactccattaatttactcatccttcttgttagacactggggtggtttcctgcctccttctattcacacagagtattcattcctgtatggctgtcttttgtacacaggagtgtgcctctgtggtccccccctggtaattacagtgtgcactcaagccttcccctccctcccttccttctccccttcccccaccccctctttctttttgacaggatctcaccatgtcgacttcgtctggcctcagattcagatcttcctgcctcagccttcctaggtgctgggactgtagaactgggcctccaagcctggcttgttccattcctacttttgtcctgcttgatgagagtggtggactgtgcatagcatgaggcaagagcatccagtgatagttcctgagtactcccacctcagtctttcctcacattccaggtaggaatgtgtaggcaccattaagcccattgtactgatgaggaaatagaggcttatcaaaatcaaagaactttctccaggctggggttggagctcagctggcatggctcttgtctagcatgcacagagccctgggtttgatcccttggcaccaagtgaagctgggcatggtagaacacaacctgtaatcccagctcgtgggaaggggcaagaggatcggaaacccaagctcatccatgcctacatggtgagtcccaggccagccttagatagaagagcccccgtccactctcaaaggacaaaaccaaaaacacctctagcaggtgaccaagtaactgctgagctgcagctcggctcaaggctgtctgctttcaaaactctgaaatgccatgtcctgttacgtgtcttcatatagtactgatcatgtgcggctaagggccacaggagtgggggggggggctttgggcaaaacctcttggacctatttgaaacctagaaaggtcaatttagaagccacaactccctatagatactgcattctttgagcgatagtcctccatccccaaagggcagaagagagattaaaatctagggctggctccagtctgctccctgagtgactttggtcttgaggttagggtaagaggttaactgagtctggggctctcccagtcaccttgtctccaggactgctaatgagacttcaaagtaccagcccaaacgacacagggaggcagggaggaaagggaaggagaatggctccagctaccgggcacccctcctaccctccagcttgcttctcacagtggcctcccacgtgtgcatgtgagtgtgactgtggatgtgaccgaacgggtcacagttcttttccacggtgcctaggaccctgatgtaggtcaccagccatgttccatccagctcattgcctgcccatcttcatcccttacccatgcctccttaaggatagcagaggccactgtcacaaaaatataagttggtgccctggaacagaaaggcctgggtgacttaggccctccttcccagctagggcaggggaagtctggggaaagtcctgtgctttgctcctgcagaaagccccagaggagcggccgacacagcagtgaatgccttagctgtcacatgtagataagagctcagctgggggaaggattgagcaaaataataccatggttaatttagataagggagtggctgtcgatgccattagccccatagagctagtgtccccagtcttcctgggctccctggccagcccctgcctcatctctccatcctgcaggttttctgaagcctgtcttcagcctgtccagactgtagtgcctcaggaccaccttgtggcactaccagccctggctccctctgtactctggtctctttctgggcttttttgtccaccttgtgttctgttcagtcccatgtggctcagatgccttctgtgagtgtccaggctgagctggggcctctttagccctgataattttcacagtcacagccctgttagctgtggccgtcattgttctgcctgttctggaggcttccgaacactgagtacctcaaaggcaggttccagtttggggccatgctgttccagagcccagactgaacacgaaccaagagagtttggtagggtgtggtgggagggaagacagggaaatagggttcaggactgtctctagcgtaaggggaggttgctgttgacttaactcacttcagttaagtcaaaaaggtgctggggccccagggtaacaaggccctcaggctgtgtgtctttatcacctctactcaggattggatgaaatgggtagaatgtctgcagaaagaagaggcagacttttgcctctgcacttgaggtcgagccaacggacacctacataggcagaaattcaggttagagtccagcacttggctctgtgggtttggtcaagtcacctcacctctatgcctatgttttctcttctgcagtgggtataaccccgtgtcactaatattttgagggtacaagttaagaatgtcattgagtactcatggcactatgtttcctgcctcctggttaattcaggccacaaagatgactgggttggacactggttgctaggctggacctaaacacaaaggaagacagacaggccaggcctcctgagaagagggccagccagctttgggttgggccttttatgaccatggaaaggacatgggtctttgctctcagaggcatcagagaccatgatgggtttgaagaacacggtcagatctgtgctttcagaagatacctgtagctgttaaggcagaggtgagttagacattagcatttacagtagacctggaggcgcagtgggttaccccgggcaccctctacggtgacttcctgaacttgtgacattggttggtcctcctttgctgtggggactggggtgtgaccagaaagccatggcaacctaatggctttcagactcagaaagctccagccactcgaggcacaggaaactgggtttgggacttgaaccttgtgaagattctggacacaatctctttcccctgcctttaagtgggggccctggagggtccagtatcaggaaatactaggagagtcatgggaaagaattccctaaaaatgacaaatacgagttgactttcttgtaagagctttcgtgtgtgtgtgtgtgtgtgtgtgtgtgtgtgtgtgtgtgtgtgtgtttaaatgcacactacccttgaggatttagaattcataaagtaacataatgaattttacaggctcagggaacctggccaagtcagcatggtcctttctgaaggaatgggtcctatcccaaggttcctttgggaatacttaaatgtgagttagtgataaaggtataacgcacacagggaaacaagccactgaaagtgacaagcaccagaaacaataagtaacagaattgttttctctgagcatctaaaagattaaaataacatataattagttgtgtcgaagatgtgtgaagaattaatcccagcacttgggaggcagaggtaggcggatttctgagttcgaggccagcctggtctacaaagtgagttccagggcaaccagagctatgcagagaaaccctgtctcgaaaaaccaaaaataaataaataataaaaataaaaaaaggtgtgtgaagaagttgaagctgaagctgaaacaattgtcagggaaccaaacactgtctaaaataaccacagacctgaaagaagaatccagcggcgcccctgaaaatgggaaccacaatcaacctgaaaaacgcagcaaccagcaaatcccacacctgaggaggaaccatgcaaagaaagccataaagggagctgtggaccaccgtgggggtgtgccagggctagggggctgcagggagtgcgggcaggggcttcctgaaggaagttctcacctgctaaacccagctcttgggaggctggggcaagaggactgagctgagcacttgagtcagcttggcttgctgtcttagtctccctcctctttgattttatttatttatttatttatttatttatttatttatttatttatttaatctatgtgaatgtcaggctgggccctggtcctctgcaagtgcaacaggtgagccactaaaccagtgagccgccgacccccgagccccatcttagcttctttttctgttactgtaataaaataactctgacaaatgcaatgtaagaaagaaagggattatcctgggcttacagttcttgggtgacacagtctgcatctggggacagtggtagcaggggcaggaagctggccgctcatatcacatccatatgtaggaagcaagaacaaacaggaagaagagctgggctataaagcctcactcagggcgcacccctagtggcccacttcccttaggaaaaccctgcctccaaaaggctcttccctaaatcaacactagctggctggagactgaatgtttatacagaggcctataggggacatttctcattcaaaccacagtagctacaagggtaggcaagagggctcagcaggtgaaggtgtttgctgccaagtgtggagatctgagttcaatccctgtgagacacatggtagaaggaagactactactgactcccacaagttgttggccgatctccacacatgtgctagggatgcacacacacacacacacacacacacacacacacacacacacacacaaaccagacaaacctaccccatcttcctccactgcaaaggctggtgttgctgaaggatgtatcaacttaaatctgccttggtgtatctctctatcaacttggaaattgcctttattatttaaaacacaaatacaactaaccatcaccgataaatgaatgcagaccttaagagagcccatcttatgggacatgaaattcagtactaaagcagctaagagactggataggaggtcgcaaaagagaaaaggggggtttcctgtcagacttgggttaccatggcagcagcttggccccgaggccccgaggcaggtgggtgagatatggttcagaactgatggtgtttggtgatggagcccagtgagagactgagtcaaagatggctatcagacttctggctggaggaactgggtgcagatgtgttactcattaagatggcagggctgggaggggcagtcttgggagagtgcgcaggaggtgagctttgagtcttctcagttcgcctgggaggagctgctgatgggcctcagggtgtgtgtcggagctggcctggtgcaaaactctctccttactgtggtttgagggtcaggattttcgtcagcggtactgcaaacttctgtaacaaacttctttcagatgcatgcctataatcccagcactgaggcaggtggatctctgtgagttccaggccagcctgatataaagagttccagagtagccagggagactctgtttcaaaaaactaaacaaaacaccactacctgtcatgcaatgatgcggcccctggagaagaggcattttcaaaagggaaagttgagagccaggcaagtcccagacttgcacttcatttattttacttgctcatgtgttggttaggagcttgctttgtgccagacatgagggctgggactgctgaagtgatagagcaagattcctgttttttatttctttttttttcttttctttcttttttttttttttaaagatttatttatcgtatgtataagagtacactgtagctgtcttcagacacaccagaagagggcatcagatcccattacagatggttgtgagccaccatgtggctgctgggaattgaactcaggacctttagaagagaaccctctctccagcccaagattcctgttttttagatgtttgtattttagtggatggagacagacactaatttaaatatataggtaggatgctaagagctgtcaaggaacttgagcaccagaagagggctaggtgtgggagaggccatcaggaaggtgacgagtctagaaggctctggaatgctcttactggaccactgccttccatggcccattgtgacagtatctgttctagagtgtaggcctgaggtcagtaagaacttggagaagaaatacccagagaggaacaagtggtccctcagtgggacagcaaagcctaatgggtcagaagggccacaaggactccctttatgattgtaaagggtaagaaagtttactcttatggcttccttgctccccatccttagccctgtccccacctgtcattgagtctcaggtgacaccctccctctttccaccactgggatccctgagaggtggctgtaaaccatccccgtgtctcactatagaatgggcagaccagagtcccagtcaggttgaccaggccggtgaggctctgccaagcctcccagcatcagggccatgtctgtctcttccctcaggtctcctgtgagcagcctccatgaggccctggaccagtgcatgacagccctggacctcttccttaccaaccagttctcagaagcactcagctacctcaaacccaggtgagcttaaatccctgaggagtgtgcacgtgcaagtgcacacaccgggagaacgtggattagaggagccccgtgagagcattacactttctgggtcaccatgacccccaagaagtctcatccaaattgcccaggcaccccttcaccccttttacagcctgtagacaccaggtggtttccacagtcacaggcacctggtggtttcctattctcactcctggggggcggggggggcagggggtgtcctctgtaaccctttaggcccgatcactgagcctttgggtagtagtgagggctgcaatattaagcgtctctccgatgtttgctgttggtttgtttagttttgagcctctgacttgagatcccccccaccccccgccaagtgctgagattcccagtgtgcaccactgggcctgacagaactatttctaattaatctgcatgtgtagctttttctttcctaacctccctcttttcagtgttaaaactgaggtataattcagataccataaaattcacttttaataaaaatgtttgtgtgtgtgtgtgtgtgtgtgtgtgtgtgtgtgtgtgtgtgtgtgtgtaggtgaggaaaactctagggaatcgggtctcttctgccaccttgtgggatcttgggaatacacttgggctgccagacctacatacagctgagtcctctcactaacccaagattccctgttttatcatttaaaaaatcttgtctcttagtagataagaatgtagctttcattggtcatggtggcacacatttatcattccaggtcttgggaggcagaggcaggtgggtctccttgagtttgaagccattctggtctttatagagttccaggacagccagggtgacatagaaagagtgttcctaaaaggaaaggaatttggctttcttacccagatgcccagtgcttgggaggtacagatagaaagcccagaacttgagcgtcatcctccagtgcatagcatacccaaggccagcctgggctacatgagatattaccttgaaaaaccaaaaccaaatgtgtttagctttagcttttcacccacctggttcctatggcttctctcatcctcctcttaccatattagcaatatttaaccaattcactaattatattactataccttcgtaattattgtattacgtctatcttggtcaacacgagcaaacaaaccacagctttcatcccaaagggaacaagagagagtttattctggggcccttttgaatgaccatgtccagggaacctgttaagtttagtaaaatacagtggtgggtacatcagaaagaccagtacagcaagatgagggaggccttacaatggtctccggatgctatcctgtggctttcctagcttctggattggtggaagctaatagttaacagattccaaaaggtttcacctattatcacaggatgtttgttccaacatagacatgggcaacgaatggctgctctggggctagaactagcccgatacaaggaaactgggccctgagcctccaacattcctatctgttctcagcactgacattccaacccattgcaaaactgcttgtttcaggagtccttcacatcttagttgtcaagacgagttgtgtgttacatgacatggatggcaatctccttgctgtttgtggtcttgttttttcatctcctaatttgctgtcctttacacttagagattttaaccctccacaggatgacacaaacccaccacaagttctccccgaatgttcaaacatacaggtgagccgtgagtgctgcttaaggagattggtgcctcctggctgggtccagctctcccctgcctccccacccgcacctgcctcagctttctgttctcatgttgcctctattttaccagagcacattttctaaagccttcccaacaaggagttgcatagagattcttttttttctgtcaaaagttggaagacatcactcacctacttcccagaagcgactatagctacagtgctggatagttttatgtcaacttggcacaagctaagtcatctgagaggagggaatctcattgatgtgggagagcctagtccaatgtgggtggttccatccctaggctacagtaactgactgagacagctgggtcctagttcttaccccatgtgtgatcttttttgtccctgtctcagaaatattcagatctactcttgttcctgtaagtatgccccacagcaatggactgggacaaaggtctctttcattctgtagttttgtaatcaattctttctgttctaggaagttctcttagtcctctgttcctttttcttaagccatgtgtaaagcttcctaggctagccttctctaagcttctcattccctcccttctttccatttaaaaaactctgtgtgtgtgtgtgtatgaatgtatgtgcatatgtgtgcttgtgtgtatgcatgtatgtgcatatgtgtgcttgtgtgtatatgtgtgtatgcatgtatgtgcatatgtgtgattgtgtatgtgtgtgtatggccactgcactgcacacacatgttaaggtcaaatgacagctttcaggagtcagccctctttgtccactgtgtagattctgggatttgaattcaggttgtcaggcttgacagcagtgcccttacatgctggaccatcgtgctgagccccacatgcacctctgacatgtctgagtgtcattaagtccttctcttcgtttctcttcacttccatgatcatgggactaattccatgatcctagcacttattattgtttctctggatgttctattttggcctttctttctttttctgcttttgtgtatgtgtgcatgtgtgtgatacacgtgtcagtgtgtgtgtgtgtgtctctgcagactatgggtaccttggggcagggcttgggtgtgatgcttctctgtgacctgatataacagggctgagtcaggttatcctcagaaacccttcatctcctgcctccctgtgcctccacagaccccagcttctagactaaagggtgcctcagggtacaggggcagcatctatcccactgtagagagcggagagggcagtaatggctaaaaaaaggaacttagctgttaccccagcaacaggggtgatgtcactggatagctggggccactgagacgtggcaggagcctggcagtttggttcccttcctcggatgcctttgtcaattatttacaaagtgccccagtaccagggcaatgctgggatcatcagagggacaactaagctttataaagggatttattgttagatcacctccctctcttgttaaagcaaagcctgtggatgttactcctttccttcagggttaaggggttttggtttggtggtggtggcggagttggtggagggtttttgtttttgttttttgaggcaggaccttggactcctccctctatctcccaaatgccgggatcacaggcttgcaccactgtcccaggctacaccgctattggccaggattcttgaggaccaaaggaaaggcttggggacttctccctaggcctgccaattcccagacaactcccaacctgtgccatgattactctgtgtctagacagtggcttgaggaaaggatttggctctggtagtgggggcgctgaacttggacttgagtccctcagacacaggttggaatcttggctttgccagtcacctgctgcgtgactctgataggcctcttggactcttggagtctcagggttcccctccacagaaaacaaatccaccaggcatggtggtgcacacctttaatctcagcacattcaggatgcagagaggcaaagctctgtaagttcgaggctagcctggtctacatggtaagttccaggccagccagagacccccacaaaaaaaataaatataaatataaataaataaataaatggaagggagggagggagggaggggcggacggacagacagatgaagaaggattaatacaatgatgtttctgtcctggaacttctagagagactgaaatggttctcagatctctggccatatcaccctgctcagtaaatgtgagtccctctgtttcaccagtgttctgagtcacttacttgagggactttggtaacaggaccaacagtatcccccagaccattcctagcctcttccctaggttcctctagcccttctctcctcttcttccggtgagccccaggactcagccctacccgtccagccacacctgcttgacgggaaggaaggagccctgcccaggcagctggcagacaaagtggaatttctagtctgagacccaaggccccagtgtatacccgtggctaggaatcctggcccttagtagcccactacctggaggactccgatctggtgtggcctggagtgggggacagaatatgctataccaggaatagcttggtagagggacctggtatggtgagccccaaattcaaacacccagagttgtatgtgtggcacttggacccctgagctgaaaccaactctgtgaaagggcgccccctggggcccagaccagatgtctggggagagtgctagaagaccatcactgaggcagatggcatctcaagccccctcctctccactagcagcacactccttggcaaccctccttccctgcctaggccccgacatctggcctccccaccctgagccctccgacctgctgctgtactcagttaggaaccccaggccaggcctacacactcccccaagctgccattgagcaaggatggaagcaacctgcagacaggtgattcctcagctaaagcctcagccctctcagaaaacaatgtccctttccttgtcatcccccagaacttcctggccccttgtgcttagcaggtggcctagcctcttccttcagagagaatagcgagacttagagctggaaggtcactagaggtcactcagcaggaagaggaactgagaactggaccaagatcttttgtttttaattacttgttacctgtctgcaaagtgtttattacctaccaggtcgcttctcccactaccccctctatctcactccccttctctgccccttcctccctggacggaggacatttgagatgccatgaatgggttagactttggaaatgtgtccccaggtaaaacaggatgagctatcaggtgatccacagccagctagccatctctggggttctcaacacccactttgtcccacagaaccaaggagagcatgtatcactccctgacgtatgccaccatcctggagatgcaggccatgatgaccttcgacccccaggacatcctgcttgctggcaacatgatgaaagaagcgcagtcgctgtgtcagaggtcagagctgtggggtcagggatggggtagtgaggctcttgcttctgtctgtctcctcattttgaccaagtgcctggtgtgtcactaaacactgtttaagaggacttgtgtcctccagtgctgagagtcgtctgttttggcatggctgtagaaccttgcctgacccagtcactggggagaaaatggattctgtctctgccacttttaaactctgtctcgggcaggtcccacccaggactcaacgatcttcatttataaaagaggtgtgatgatgtgtgagtcacagggttgtcctggagacacagtggcagggcctggtgtgtgcttgagtgagtttagtccggagtctatgaatgaagtaacagttcctgggtgtttgtgtactgatggtgtcactggccgctgggcacacatctattctgggccaggccctggggatccgggaactccttaggcctcggcagttctgctcagctcactacctggcaggaacacagccccacccatggcatctaatatgaggcagacaagctggaggcaccataaagcttcatcccatagtagcgatggctctaggggcaggggtgggggtggggtgacacctgagcttggtccagggaggtgaacagagccggttataaggccaaaagtttagaaagctctggaccaggggagttgggagtgtgactcaatacagcacttgcctagtatatagggtgctctgagtttgaaccccaacacagtgaggaagggagaaatgaagaaagaattccagcaagccagccctggattgggagagctgtagacctgagtctggaggactctgtgggaggtgcccacaaaccttcaaatatttgaaagtatagcaaagtgtgcctgtgtgtgtgtgcgcgcgtgtgtgtgcttgcgcacgtgcttgtattatatgctcttgcatgcttgcatgcacataaagacaagtgtgacatggactggtcctctttccacctcatggaatcatggggcccttttccttttctaggcatcgaaggaagtcttctatgacggactcattcagcaacctggtgcaccgtcctaccattgaccagttcacagaaggtgtggcatccaagaggtcttctccagcattgactctggtggctccaggcccaggaaggggagggaagcgtggaagggaggagagaaaagttattcattccagtgttcccaaggaggctgtgctacagccgaatgcctggcctttggcctttggaggaaggcttagtactggagaggcccagccacccaacattaccagctaagcatctggaagactgaaacgtggctttgctcctcagcccaggggtgtttagaatgtgcctttgtgacttcatgtgccccagagggaatgtggctttgcttgagcctcctgcctaggaccccaggctttgcttgttttctgttcctgcagaggaaatccatgcagaggtctgttatgcagaatgcctactacagagagcggccctgaccttcctgcaggtaggaagctctccccaccccagcccaccccacacctgggcagagagcattctggatcagtccccaagtccaagcatgacctgtcctctgagaagtgacaaagcccgaggttcagattcccaaactctgaagcctggccaagctgggtaaggaggggtgggcgtgtcttcttcatacaccagggttctcatggtgccgcttccttctggtcactgctcttgctcctgtcaagactcacgtggacacaggcattgtcacagatctgctttgcttgattcatgcagcaaacacctggagcaaataatataccaggcttatgatagacctgtcattttgcataaatgtgtggtacatgcatacatgtgtggagaacagaagttgatatcaggtatcttcctcagtcacttcccacattttaaactattttagtgtctgtgcacacatacacatgcatgtgtgcaaatggatacatacatgcatgcctgtgtgtatgtgtgcatgcatgtttgcctgtgatgggaagagggaaaggcatgccatggatgtgtggaggtcagaggagaactttttgggaattggttctctccttctgctttgttttgaggcagagtctcatttttgctgctgagctgtgtactccaggctagctactgagctgtgtactcccggctagctggctggaaagcttccagatgattctcctgtctctgcctccatcctctgggaaggattacaaatgtactcagtgaatctgaattctgttcttaggttagtgtagcaagcactttagcttctgagtcatctccctagcccccatttgtatacttcccacaatgtgaggtcctttctgacacgtctacacttgttacttgactgggacaggaaagcagagtcctaaggagaggactcctaaggttacctgattagtgaactgggacttgaatttgggtctggccaagtcagagacaggtctccctaccacagtggggattacacaagcacacagtctactagaacttctttgcattgtagtatgtttgtatgtatgtatgtatgtatgtatgtatgtatgtatgtatgtatgtatgtatatatatatatatgtgtgtgtgtgtgtgtactggaggagggaagatgaattttagtgttgggtgctatttattttctttagctccttttttgttttagattgttttgcattaagccagttccctacatagaccaaaccagccttgaactcacagcaatccacttgcctctgcctctcaagtgttgagattaaatgtgtgtgctaccatacctggcttctttcgctctttttagcttttaaaaaatatcattttatgtgtgtgggcgttttgcctgttaatatgctgagtactccgggcgtgcctggtgtccttgaaagccagaagagggctttggattccctggaactagagttacagacagttttgagccaccatgtgtgtgctgtgaatttaacccaggccttctggaagaatagccaatgagccactatatcagaccatacagtgttacttgtatgcatattttcagggctgacactttgggactggaaatccaattggtgggctcgccagcccttccttagctcgtttttaaaactgtaatttaattacatttctctcttctctttccaacctctaactccaccattatacccttccccactccccttcaaatttatgaactctctttttctcactaattgtcattgcatacatatacttatatgtatatacatatacatgtacattgctaagtacaacctgttctgtctatactgattgtatgttttcagagctaaccatttgacactggacaaccagctggtgagctctttcctggggaagacctcccctcccacccctagttctcctattttctattgttctcagtataaggttgaagccttgtagacttgtccctgtccaccttggcatctgcattgcattcatccttgttctgctcacaattgggcagtcacatgggtgagtctttatgggtgtagcttcagacatcccaggagacacaaactcatagcaaaccccctgatcctctggctcttatgatctctgccctctcttccctgagccttaggtgtgggaatgttttgtagatgtatccactgggactgaattccacaactgtgttttgattggttgtggttttctgtagtggtccccatccattacaaagagaagtttccttgatggggggtaatgactgtacttatctgtaggtataaggacaagtgtttacagactcttgtcaggggttatgctagcttagtaaattaatgaatgtagatcctccagtacccatgacttcactagtactagtagttggctagttttccaataccagacatggtttccctcttattgtacagatcttaaatccaattatagagctattggtgactgccaaggtatgcatgctactagggcccctttaggatcaccgtgccatgctgatcatcgatggggttcacaggcatcgtagacagatatctttagctcgtttttaaaaaatctttgtggcccctgggtgatttaagctggactaatcctagtcttccatttagtattcactgaaacaagaatggcattttcttttattcacttttgttatatattttaattacacatatcccctgattcatctggaggccagagtcaacacagcaagactcatccctctaccccatgacactgtcccagccattaccttctttgtcaccctcacctgagtgtatctgaacagcatactgttatagtgtgtcacaaagacttatagttgtatgggacttgaattctccatttgtctttgtgttgtctgggcaatattctcttaggtaaatatgccccagtttatacctagtctcccatgggtgagccttggttacttttgggttttggtttcatgaacactgatgttgtgtggctcctgataatgcttttcagcccacgcccattcgtttcctgtgagtggacacccaggattggggttaccagacaaacgggggctcctggaactttaaataataaattacaacttgcttcaatattctaaaaaatgagtgcctctcttcatcctacattgtccttcgaccagagggagacactgttgactgtatatgtgcctatgtctgtctgtctgcctgcctgtctgagaaaggcagttgtggcagtctgctttgagtgacctctgaccactcctgcctcatttgccatagatctgggcacagggtagaggcctacagtcttgtgtgaccctctagtctccagtcacctgccctggacctagctctcttcgtctctctccaccacaggacgagaacatggtgagcttcatcaagggcggcatcaaagtgcggaacagctaccagacttacaagtaagtggggtcagcctgcggggagctgagggcctggggccacagagtctacgacctatcccctcagactgaattgtgggtggctcaaagtctagaaaactggggttcggatagatttctgtacttctaggcttccattttctggagtaatgtcctcctggttttttggctacactgtgggtttggcttcttgagtgccttgtctgctagagaaaaagaagacccaggctctacacaaacagcctgggctggtgggcaggagacagacagactttaaggaacagcagcagaactacacattcgtaaaggcccagtccaaatcctacttgcccttttgattttttaaagatttatttgtttgtttgtttgtttgtttgtttgtttaatgtgtgtgagttcactgtcgctgtcttcagacacaccagaagaggggattgaatcccattacagatggttgtgagtcaccatgtagttgctgggaattgaactcaggacctctggaagagcagtcagtgcttttaaccactgagcttcaatattccaaaataagccatctctccagactccaaatcctatttttcatatgaagtcttccttgacctttcaacatacagggatagcatgtgtgcacacagacatagatacacatatgcagacatgaacacatatacacacactcacacatggatacacatatacacacacataacacatacacacagagagacacatatgcaaagatacacatactcacacatacacacagatgtacactccccaagggctagaatcattcccacactatgcctgggttcctgatacaagtcctctgggccaggggtgagctgtgctgatggtagaaaggcagagagcactttcacccagtgtggtgaagcagtctcttactccaagtctgcaatcagataaagctctgaaaacgcagccctctgtcctgtcagtttcacagtaggactcacttcccattacacttggagaacatttgctgtctttccctcctcctccagagtgactgtcccctgcacagtacacctaaagaaggcctgtgctgggattgtccagatacaagggactgccacaagtctctccagtgtccttgctagcttccagcagggtgtctgcaaagtacatgcctgcccaggccagctctttctggctcccaggctcccctgtcttgtagagtgatgccctgagtctgatcgtcccatgagctcccctccctaaccctgcagcctctcccatggctctcagctgcagaccctcaggcctgccctcagttcttcaaatacgccaagctcatctgtgcttcacagcttgcaggcatgttgtctctgtcagcacacggcaccaggctagctccaactcacctcctaggccctggctcccatcctggctatcccactggggagaggctcctgctcacatgtaacaggaggaggcctgggatgctttaaatatcctatactgtggacaggttccctcttttcccccaacaaagaattatccagcctaagatggcaatagaggccaaaggagtggattgtaccattgcaccactaaggccaatgtggtgtcatgtaagggtgagaagcatccgtctgtggtagatgtaagtcaggaaggaaattcatctagtaacagctccctgggtctgcagaactctaagcccaccattattgagttcctgacagggaggtggagggatgggtcccatcctggcttcagcactcggctacccttcccacagggaactggatagcctcgtccagtcctcgcaatactctaagggagagagccacagacactttgaaggaggggtgaagcttggcgtaggagccttcaacctggtgagtgggaaccccttatttcctgagtttctgggccccagatgcagatctcttgcatgtccttgacccacacaaggtcaccctttggtgacactgagcctggctgtgtcctaggcatgggatgctgagatgattcttacattatcaccagtcttaaggggcttgagcagggctgtcacagaaggtgaccacctctagagcgtccatatgtgcccacatggtagcttgaacccctgtgagatgccatagacattggcaacctcgggaagccagaccgtttccaccccagagagctggctgttaaaatgcttaccaggggtgcagaaggagacagggctgagagcagttgtgagccacaggggacagggattctcttcaggggtcctcccaggggaggaagataagcaagcatttcaattggctctgaaaagatgcactaggcatttcaggcagagggagtatgggctgggttggagagacaagcagatgctgagcctgcttgtgaagggaggcgctggtccagggagatggtgcaaaggctggtctgagtccagaaggggtggccgctctctcactgtgtgaagggtgagcggtgggtggggtcctctgacttttcctaggatgccctccacacacccatgcctctgaccctacagacgctgtccatgcttcccaccaggattctgaggctgctggagtttgttgggttttcaggaaacaaggtaaatgcccacctttgggttggagctgggctaaacaaaggggggctgggggaccatggcctggtgccaatcctggctcagatccatctctgtgtgtggccctggagctactctagacctctgggcctcaggcttccctcagggtttgggaggccacagatctctccctgcctggcatcaagggtagatatgaggatagccccatagggacctgagggcacattgtctgaggatagccccataggcacctgagggcacattgtctgaggatagccccatagggaccgagggcacattgtctgaggatagccccatagggacctgagggcacattgtctgaggatagccccatagggaccgagggcacattgtctgaggatagccccatagggaccgagggcacattgtctgaggatagccccatagggaccgagggcacattgtctgaggatagccccatagggaccgagggcacattgtcttcccatggcatggattaggaaccgggtcttctcctcttggtcacctgctcacttcaaggccttgggttagtcctctcatctaaggccagcttttggtgctcctacttcatctgtgagctgtgcaggggtcccttctgtgcaacagacgttgagaagaaccaggagactcactgaggccaagacctggcacaccagcaggggttgggggagcagagcagggaagtccccttcaggatgcagccagtgtggtgaacagagcactgtcctggacgtcaggagtcatccccagcctcctccccacgatgctagacaattcccctttctccatgaacctcctctctgtaaaataagaggcttcatattgtcctgaagatgctgagggagatagtttctctagccgtcctgatatcagacacatatcactagtttatggtttatctgttattttttttcccaaaatgacatcattttttacctaaatgtatttaaaggagatgttattatgcaaaatccacctaatttaatcatggaaaaaaaatcattaagaggcccatacaaagccaggcctgctggctcacagcttgaatgctagcacttcgaagacagaggtagaggcaggaggatctctgagttcaaggccagcagcctggtctatagagtgagtttcagggcagttattagatatacttggtgagaccctttctcaacaaacaaacacaaagcatgacacataacagtcttcagaaggggctggagagatggctcagaggttaagagcactgactgctcttccagaggtcctgagttcaattctcaacaatcacatggtggctcatagccatctataatgaaatctggtgccctcttctggtgtgcatacatacatgcatgtagtgtgctatatagtaaataaatcttaaaaaagaagaagaaaaaatagcgataaggttggccacggctctgcctgtttcgcttctcgttgtgggtgagagctgagttgtgtgagccccatccttggccctgggaaacccccacagctggaggcttcagggccccgtgtgttgctccctagagcaggcagttggatagggaggtctcaggtgggaaggtcaaccctagcctgttcgggcgcagcaattcccccagcagagaagctgtggagggtttgaggcaggccaggcctatatttgagaagatggagactacacacacaggttaggtctggtcacagagatgttctggaacattctcccccagcaagcctttcaaggccccaggcttctggaaccatcagtaccagattgtggttagggttattttcctcaagctattccttctcccctccccatcgctccacctgcacgcactcttgaccccctcatgggggtctcatgactgccagcctctcttcttgtccccaggactatgggctgctgcagctggaggagggcgcaaccggacacagcttccgtgcagtgctgtgcgtcatgctgttgctgtgttatcacaccttcctcaccttcgtgctcggtaggaggcccagtgtgcaagagggcgggctcccgggtgagaggctgcacaccctgctcaggcacgcaggactggggccgagccaggtctgcagcctgcatctggcttactgaacagcaatttcctctctctgtgggttccatctgtgaaatgggggcgattgcgccaccttgtggaaagtatgaagatgctgtccctcctgggtgcagactgaaaagtggcctccagattattgagcctgtgatgtgacccggcagtatccacattagcttgtttaagcctcctatcactctagagataggaggaatcattgtaccatcccacaagggaaaggcagaggccccaagaaggctttggcaggttgttagagggagcgcaggccccagcaacggttacccgagcaatgtacctccctgccacctccaggtactgggaatgtcaacatcgaggaggcagagaagctgctgaagccctacctgaaccgataccccaaggtgagaccagtccctgctgggcactcccaccccaccagtacccagtggacccacccggatcctcacgagtatcattgcagggcgccatcttcctgttctttgctgggcggattgaagctatcaaaggaaatattgatgctgtgagtgatgtggggctttcttggggtatcccagcccagcaagacgttagatacatagaggccatactcggggatagggtgagcccaggaaggggcaggggtaggagaagcattctgtcagaggtggtctgggaggagagaggtgccttttgataggaagatataggattctgacattcctgatcaggaaaagctgctgtccccccggggcatgggtgactaggctggattcggtgaatagggtaggggtgggagtgaggaaggaggagaaagggccatggaaagggattgggcaatgtttttcaacctgtgggtcatgacccttttggggccaaatgaccctttcacgggagtcacctaagaccatcagaagaaaactttagatatttacagttcacaacagtaacaaaattacagttatgaagtagcaatgaaaataattgtatggttgggaatcactacaacacgaggaactgtattaaaaggtcacagcattagtaagggtgagaaccactgagctagagacagggaaggtcacagccatggcaaagctcagagaactatgccaatatagaaggctacattccagagtcctggaaatctccagcgagccctcgcaggataaatccctggctgtgagtaaccatggaaactactggactctttggtgttctttctgaggtccagacattattgtattagtatattaacaccttctgggactggatggatggcccagttggtaagctgcttggcacaaaaggataagacctgagtttagtccccagcacccatgtgaaaaagccagacatggtggcatgaggtttgttgaccagccagcctagcctaatcggggaaccccaggtctcagcgagaaaccctgtctcaagataaagatggatagctcctgaggaaaggtgcttggggttggctccacccacatccatgcccacgtgcacacagggatgggagaattacagcctcaacagcttgtaccttctgtcccctcccccagtgtgctctgctcggagctctcactcagggaccagatctctagaatccatacgagggggcaagcatcatggatcgtcaatgaggcttagtgtcgcgccagtacaggaagccagattccctggcttccagacgcccgtgccttgggggaggccatccctgctgtgggctgtggggccaggtggggcctccctgagctggcctgtgcttgtcccaggctgtcctatgggggcccgctgggcctccctaagctggcctctgcttgtcccaggctgtcctatgggggcccactgggcctccctaagctggcctgtgcttgtcccaggctgtcctatgggggtccggtgggcctccctgagctgacctctgcttgtcccaggctgtccggcggtttgaggagtgctgcgaggcccagcagcactggaagcagtttcaccacatgtgctactgggagctgatgtggtgctttacctacaagggccagtggaaaatggcctacttctacgccgacctgctgagcaaggagaactcctggtccaaggtaagctgacactgtgggtcaggggtcgccccgataagccatggagcctcggagctaagggccaaacccctgactgaacacagatttgtcccctggcatctaaacagaaccaaatgtttgaacaggactcagggttgggaggagggaaaagctgtgaccagcagagaaactggacttggtgctggggattgatccagggccctgtctatccacgctaagcatcccctgcttcccgagttacacccctccaactccgaagtgtcagcgtatctacctatcacatgtctagcaagtgctgtctaatcacactggctactgtggcaggggtgtctttcttctgtgctaccccagtgtggcagccaccagccacatggacacatcaccaacacattgtttacactttatgtgttttaaatcaaagggctccaagtaggcctaagaaggtaaaacctttgaaggggagccagggagggtgaaagcccagagcaagaaatgcacgggctcagggctcgggtactcccgagaggctctgtgtccactgggtaagggctgtggtatgaaagtgaggccggatgccagaagccacttgctggaagctgacaggtactgtgtgcctggcacagcctgggtttcctactgcagtgaggtaaacatttgtggaatgagagggcaaacagctgacaccagggagaaggccttggatcagaagtgactgtggtctacccgatgtccctggatgacttgactgtaaatgagtcactgcatactccagcctgactcctggttgtcagtgagtggaagaggtctgtcagggtgggggcagggaggccgtaagagaaagtcttcacaggcaaaagcccagagggtctatggagggatggggaagagatgccatcagacgatcctgtgtttggggcaggtcatggaaagcctgacaggtccttcgagctttattatagcgggggcagaaaggaccttgaattcttgtgcttgctgggcactctcggtggcaggcctaggccaggatacagagagaacaaagagaagacactgaaggcacagagccatgaagaacagaagatataccatgtttgatgactttcagtgaaaaaactccccagtcagggacaacatggggtacagtcaagaggtaggccatatatgtcttgaaggactgctgtgggctacaggtggagccccactcccaccccacccccatctggatcaaggcaatggctgggattaaaagcttgtgccaccatgtccagctgtcatgtcccacattctcctgtggcttactgatttccttctgtccctatccccttgtcccgtcatgtgactcatggactatgtgttccccttgcctatatgagaccatgtattaactatctcccatagttaatatgaaaaatgagctactattcaataactcattttttgtgtgtgctagaacatatatttggcacatgaatctgtgaaggaggccagacactggcttccagatgtcattctctcttgctctctatcttattttttgaagtgatatctcttcatggaatatgaaccttgtcatttcagctatgtgggcttgccagtgaaccctagggacttcctgtatttgccctgcttcaactctgccccacttgccagtcccaaactggggttacagacacctgcaaggaagcctagctttatgcatgtgctgacgaactcaggttctcacacgtatgcagtgagcattttatacactgagccattacccattacccagacttttttttcctgtctgttttttatgtcaacttgatataaactggcgtcatctggaaggaggtaacttcaacagagaaaatgccccccataagatcagactgtaggcaagcctggaggattttttttttttttttttaagattagtgattgatgtgggagggtgatgtcaccctgagctggtggtcctgggtttcataagaaagcaggctgaataagccacgaggagtaaggcagtaagcagcccccctcacggcctctgcatcagctcctgcctccaggttcctgccctgcttgagttcctgcccttgctgctctctgtgatgaactgttctatggaactgtgagtccaatcaaccctttcctcctctgtgtgtcacgatgtttcacctcagccatagaaacccaaactaagacaagtctctcattccagcctgggcctagaacccacgtagcttaggctgtccgtaaacttgaagccattttcctgccttaggctaacaattgttaggatttcaggtgagagacatcacctcatgctaagatcttttaaaaattaattttggggggtagcacacaaaattatggattttattgtgacattttcatacatatatgaaggtatatagtgtactctgcctatttccagccgccttctccccagtctacctttctccaaagtcttcctctttcatgttttatatatgtttctatatccatccatccatccatccatccatccatccatccatccatccatccatccatccatccctgttgccatgatcaacaccatgacggagccagctagttttatgtcaacttgacacaggctagagtcatctttagagaaaagggagcctcagttgaaaaatgcctctagatacagccacaggcaagactatggggcattttcttaattactgatgatgtgggagggcccagaccattgtgggaagtacacccctgggatggtggtcctaggttctagaagaaagcaggcagagcaagctgtgggaagccagtaagcggtggccctccacgagctctgcatcagctcctgcctccaggttcctgccctcactgctttcagtgatgaaacagttattggaacagagtacataagccctttcctccccaggttgcttttggccatggtgtttcatcacagcagtagtgaacctaactacgataaattggtactaggataatggggtattgttacgtcagacctaaccatgatttgggagaatatggaagaactttgaaattttgggctagaaaagccaatgagtgtccaaagcgtggaagataaaaatgttgagagcaatacagacaatgaaggcctggcttgtgaacttctagaaggaagtttgagagtcacttaaagactatcagggctatctgctattttgagttgggaatctgtgattagggttggctggggctgaagaacccgctatgattaacaagagaccagaacctctgaagtaaaatctttgctttactggggcaattgatactggttagctggagctaagaaattagcagtgattaagaaaagagcagcattgcgaggtgaaccctgggaagtgtttgctgaagtcagcacacagaagctagaggcagccaactaagttgagttacacattaagttagttacccaggtagtattggttttgaaggcatgaaggactcatgaaacacagctgaggcttggcacagagggaccaggatagactgctgagaaggtgcagcctcagcagcagttgaagcttgctcctttaggtacactcaggagtggtatacctgaatcgtacgtatgatagctctgtttttatgtttgtgaagaatgtccacactgatttctatactggccgcaccaatgtagtctcagcaggctataaggatgtgctctttccccatatcctcaccaatgtttgttgttgctggttttcttgcagttttgatttgcatttcccttatggctaaggatgttgaacatttccccaaatacttattgactatttatatcccaagtattacctatatctcttttgaaaattgttacgtattttatgtagttgttcattactgtgtatgattatggtgggtgtcggctctgttctccctttctaccctttgtgagtccctgggattgaactcagttgttatgctcgtatgacaacctctttacctgttgcgctatctagatgaccccttctttttctttttctttttttgagatagggtctcacttagctcaggctggcctcaaacttacaatgaagctaggaataaacatgagctcatgatctacctgccctcacttcccagctgctgcagttacagactccatgcctggatcccaactcatttgctgattggttgacttttagacagaccttttataaccatttttttaaaaacagacatcacaagtttttttttttttttttaacctggttacttcacactaattggcaagttttaaattcttagttaaaaaacccaaatagagccaggcagtggtggcacacgcctttaatcccagcactcaggagacaggggcaggcagatttgagtttgaggccagcctggtctacagagtgagttccagggcagccagggttatacagagaaaccctgtctcaaaaaaacccaaaaacaaaaataaaaaaaacaaaaaacaaaaaaacccaaataaactgaatttgttcgggggcagtgttccagtaaggaagatgtccctgggggtgggggatgtagagtctgtccattacttacgaaactgatttggaattagtgtatatgtactcctgccatgtcgttattaaattcagaatatatcacaggcatccaatctagacaaaactagacaggaggttcagtccctggaatgcactgcacccatgtcagggacaggggagatctataggtatgggcaagggtgacaccatgttagaggttccatgaggggattccattacacactcacaaagacaagtttggccatgtttgaagggcaggccacctgagggtctttgctccagcacgaatggcacgggtgaatgttccaggatgtcctgatgttctttttctccagttctcttttggccactggcagatactttccttggcagagctgtcctgggaggcagctgtttcaaaacttggccacttgagggcagcactgagccaaacacctctaaccctctacgttgtgggacttatgcttatgggctgtgtaggccactctgcagctgaagcagggctccccactttccctgtcaggtggcctacggatctagcaggcaaggtccttgcagacattttaagatggattgagatgaaggtgtaaagtgagggatgtaggtctatcactgagccctgtgagggtgccctgttcactgttctggacctatacctccttcacatagtccctattgcaggtcatctgtgcccatgcatgtcctatctgcttccatgtatatgggtacccttgagtctctgaatctccccactatccggcagggccgcctgcagtcactgcttcccagcagcaccctccatgctcaccctgtctctgcattgtcccagcagccctgcatgttgctcaggtctctcttgatggggccaagatggagagggaggctgctttgcaggtatacaactcccacctctaaactcctcggttgcttcagcattctcccctgggggcttagtgactataaatctctatggaaccacagtgagggttgaatttcatgtggcactcactgcgattagaaggagggctgctcacatctctgctgctatctcccacaggccacctacatctacatgaaggctgcctacctcagcatgtttgggaaggaagactacaagccattcggggacaatgaagtggagttattcaggtgggcctgaccacagtgctcctgctgtaggtctcactgtggacagacaggtcaggctctgctcatggctatctgagctttagtgatgcgataggtactcccagctctcagttgcctgttccaaagtgccctgtgcccttagtcccctctggctaccatgccatgccagtgctgctggtggttagaatcctgtgaatgtttgtcatctctttcatctggtcactgagacagacgaggaccctgtcttggccacctttgcagtgataaagcaccaggacaagtgcaccacagcagggatgatggcaggagcgcagtgataaagggacgggcatggtaacaactgcaaatgcaaagcagagagcaaactgggagtaggggaggctatgcacgcgctctccaagtttgcccccagtgacctacttcctctagcacagtcatatttcctaaacctctccctagaacagcaccacccactggcaaccccgtgttgaaatccctgtaggggacatttttcatttaaaccaccagaatctgaggtacaaagagatctctccaccagctgagcttgctagagccacagagcagcacagccaaagtcattgaatcaaaccgacagcattaaaaccacggcccagctgggacgccttttaagataggctagttttgcaactggaaaaggggctttgaagaccctgcagtagaatctggaaccaagggggctgcccaccagagtttttcattattatttcattatatcttttcagtattctcttcaccacttatttgccttttgtgaagagtcaaaaggttaacctggagttgtaggatggtgtctagggctctcctcccatggtggaaatgaggctggccagcttcactgacagatgcttgttagagctgaaatagtactgtctgtgcatagtctgctgctggagcaaacggtggccccagctcacagaattctcccacagcccttgagaggaaggaggtagtacaatctatacttttgagattagaaaacagaccctgagtggttctgcaatgaatacgcagcaaggaatctggggtggcctcacccatcagttgtttcctgagcccatacagctcggggtctgagatcccagtcacacccaatggccaggcagctggtagtgggtgaggctccagtcaaggcatgcccagctgtgtgaattttattctatccttgaaacagctgaggaggccacagttcaggaggctggagttaattaagggtttgggctgtttgtctgtgcaagtccctcttttctctgggtgttggtcatgcctgtgaaactgggattagacttttgtgggccctcccaggaaggcctgggcgtagaggagagataactaggaggcaggcctagatgcattcttaaactagctctggaacctttgcccaaccatgacctgaaagctatcaggtcatgcaggaactgtgaaatgtgaccataaccataggctggcttgctccttgaaatacttttagagtcaagctctttcatcgtacagtgtggaaactgaggtgtagccaggcaagcaaaggctggagacctgttctctctatgctcctgctcttttgtggctggggacctggacatgttaggcaggagctctcccactgacctgcaatctcaatccttctttcccatttcttcagggccgtgccaggcttgaagctcaagattgctgggaaatctctacccacagagaagtttgctatccggaagtccaggcgctacctctcccccaaccccatctccttgccgatccctgctctggtaggtaggaagagagcctctgggtcagagggtggatgaagggaccagaaagggtttcacaattcacctaggctgggagacagaccagcaggctgcaagatgcctcaaggatggaagagctctccgagacactacataacaccccagccccaagcagagggatcacctggctgtcttgttcttacagtgactattctgttgtcacagggttctaattgctatttacatagtcaccctcattagatcaaccttttctgaagggagggttgggggggtctcaggccaagttatgtttgactctgaacaaaaccttcatagtagggggtataaagcctaacacaggtcggtagtaacttgaatagctcatacagatggagtaaaaaaaaaaaaaaaaaaaaaaaatcaagagatgtaagaggctaaatccagggccactgttaagctaattccatgaatgactggagctggcatcaaaataagctgagtccacaaaagtaggagccctgctctgctctgcttgttggataaactttcctgttcaatggtgtgttaccttagggagcccttctatctactgtaaagtcagctcttccttggcacctggcccagttctaaaggattttacagactgtgtgtggcagcacatgtctgtaatcccagcgtgtgggaggtagaggcacaggggtatcctcaagctacgccatgaatttgacgccagtctggagtacaagagaccctgtctcaaaaagatgcacaatcaagttattactatcataatgggcatggggtatcatgggaagggtgggagtgactatgcccgcttctgtacaaagtcacctgtgattaagggcactgggaggacaggctgtggacttctagagccgttatagccagttttctatcttgagaccacagagcaacttaaggaacactgacctaaatctacattgaaacaaaaaccctgacaacctttagggccttatataaattgcacccagtatccattacctgtcctgatggtttaggatgactctaagctaagttattgaaagtttaatgaatttcctgccagtcaaggaaaaaaggatcaggatgcattctaatctcgatgaggaggctgccatccttgagcctgttgtgggggaaagggacagtcttaggctcgactgtcctgagtggcttagtagcttcctccaataagggaggtcctgccagcgggagtagggagggttccatgaacagtgttgggcatggcctagtcctcaagaaaggagtctggatgaagagagggtatgagagtattcatgcaaggtacagtaggtaagtagctgaaacctaatggctgttggattaccctaaacccttatggaatcaataagctcaataacaaatccctggtaaggttgcttccacagtgccctcaatcctacagctttataggctagaaggagacttgaagatcagggatccaaaggctcaggaccttttgaactgagctgcctgttttacagacgggaaaactgaggccctgctgaggcagagacctagaactgacttgccccacccactccctccctctctcaggaaatgatgtacatctggaatggctatgctgtgattgggaagcagccgacactcacggatgggatgctggaggtcatcaccaaggctgaagagatgctggcaatgggcccaggtgattaccctcaggctcctgacccgctaggtcaggtctttagagttcaaggttcctatgccagaaatgtcctccttatccctctatcctactaaccagccttttacaagaccagtgtcagctcctctcactcagcaagtgtccccgctcctcgtccagggccttctcttgagcgtcctccagtcactcctaactcactctggagccattatctcaatatctgtcttttcttctcagatgtgagtcccctgaggtgaatcggtcttgattcacctgtgtcctgggttcctgaggggctccctgagtaacttgcagaagtgagcaagcctaccttcttcccccacacctctattctcagagaatgagtactcagcagatgacgactgcttggttaaattgctgaaaggcctgtgtctgaaatacctgggccgaatccaggaggcagaggagaatttcaggagcatttctgccaagtaagtgcctttgctactcccgctgggcttggcttctccatcctcctactcctcccaccagctcactcaccatacatttgctgatgtctactctgtgccaggataagagataccaggaaaggctatcagggcgatggttaatttggatgtttatagctcatggttttaatcttagcacttgggaggtagaggcagaaaaatttctaagtttgaggccaggacatagcaagaccttgttccaataaacaaacacaaattaataaatttggaagtttagctagaagacaaaaacaaaagagaaagttttaagtggagtgttcgtgggcacaggacacacagcagaagctagtgacaacagtgaggatctttcctgcctaaaactatagagaaaggccagactaagaagggccttgtcttcacaggataaagacagataaccaagaaaggatatggcaaaaaagactgttgtctctaggacagaatgaagcaagggtcagagatactaaaataggaacaggcttcccagtttaagagaccaacctggagtgacagaggttgaggactgtaacagggaggtgggctaaggatgccagaaggctctggtgaagatcccagcctttctaaggtaaggatttgaagttctgaaggctgtggagaggacctgaagggtgggccatgtctgcttctgttttgcagtgaaaagaagattaaatatgaccattacttgattccaaatgccctactggaactggccctgctatttatggagcaaggcagaaatgaggaggccatcaaactcttagagtctgcaaagtaaggcttggtcaatcctcatatttcctagctgtactccctttgacctaaggtgcccagatatcagtgaggatgctggcaaaggcagtgttctgggaactcagttctgacatgctacaacagagctttcccctcagtttacaaataactggctggaattattgagacagaaagtaagcttccaatggcccaccctaagccagctgtggagctggtataaagacctaagtctccaacaggaccaagagtggtaagacagtagccccttgtaaataagtcttcctttaggcaagggctcagcttagtcttgaatccctttcaaagtcctaaaaactacaaagtgttccagttgtatacggatgagggtggtgtctcacatagctcaaatgggggattggagtatgacacacctcccagaagagccgagcttcacctgtgatcctctgctcccctttaggcaaaactacaagaactactccatggagtcaaggacacattttcgaatccaggcagccacactccaggccagatcttccctagaagatggcaacagatctctagtctcgtcagtgtccttgtagctttctgcagcactcttgggctgcacgatgaacagacagctagctggacagagcacctggaaacatttctaaagatcacctcccctgccctgcccttccttggggtccacctggtgctccagtaggattgcacaagaatatctgtgcagaagcaaagacagcatttttaccagtgtggccaaagccttcacacatacgggtacttgttttacactgtgatgtttaagagaatgtatgaacagtttacatttctttagaaatacatcgatgggattataattggtgtttaaaaaaccaaaccaaacaaactaccccccccctccaaacaaacaaaagcaacccgactgcctggaaagctgtttagctcctgacctggaagttctctacatgctattaaaggccacactgcttctcagacctcagcttttgaggacaggggttcctagcatctgagtcattgcaaattccaggacagccacagctacgcagtgagacactgggtccaaacaaaataaagcaaattaagttgctaacatttaatatagttttcatatacatttttgtcttctaattgaaaaacaaggcaagggaatcagacgcgtaagccattctttgagagtctgaagcctgacgaggtacttaagacccctggttaaaagtaaaacatgaaaggatctggcaatagaatagtaaagtcttacttaacaggacaacaaacaggaggctaccctacagcctgctaattatgatgtcagccaaaacaaaacacttgatcctttttctcccttaattctactttttttttttttcccaaaagaatcctttctacagacaaacctttttttaaagcctagatgctgggagaccagtctgagcaggatagggtgaggagtgattagagagcagctactgaaggagggtgagcctttgaggccctaccactatgccaaagcagcacctgtcacatgatgctaacacatgtaaaactgcagcctacaaaactgctacggctgatttcctactgaacttcatttaactagcacatttttacctcggttgccctggttgcagtctggctaatgacaattcagaggattaggcctcttgtattccacctgtaacttctgagaacactggatttctaaatccatcctatcctaggctccttcatgtcctgagtcactctaggccacttctgccctgtgggagactgtaacagctgggaagcccacccagaggacacaaatggagaagttgccaggggagcagccactgtgtcacaggatctgaagggcccttggctatgcagtctagctctgatgctcagggctctgctgggtggctggcagtatgctggtccctatcagctctctcccacaccttggcagcttttcctatttccttatctcttgagtcagagtgggagtgtttccaagacagttatcacgattcacagcaaaagccacaacctgacaccaaaactaggtcccccaaaggccaacctcaacccaaggcttggctcgggtccaggtaagagattcccagtaagaatgatttgagaagaagctgggaccattttaacaaagcatccacccacttcaacaatctcctgttgtactgcacatacacagtcttccagtgcctcagcaaccattccctgatgtcctcgtaatcatcagtaatatgactgcactcagaaatccaatcataaatgggatttccaaggttaaaaggtgttgatctactggggttagcacagcttctctaaaatcaggcaagaagttcaatattgaccaataaggtaaacccacaaccaacctcatttggaaatccattcctaaatgagaaactataattgtttccattgcataaaggcagttaatgaaacagagctctttggaggcatacagttaccagtagactatggttgataagcagacttccagtcagagacaccacagctaacaccttgcacatgactgggacaggctgttttccttcacagtaagggacacttcacaattttagatatctagctgggcatgctgacacgtacctatattctcagtgggaagattaagaatttatgctggtcagtggtggcataatcccagcacttggataagtttgaggccagacttgtcctacagagtgagttccaggacactcagggctacacagagaaaccctgccttgaaaaaacaaaagaataaaggaaatctgctacactgccacatactgagttcaaagtcagcatgggctgagaccctgtctcaacaaatcatatgttctgtgggaaaaaaaccaactagttagtaaattaagtactcacatctactagttgctaccaaactagttgtattccttataagctccctgtgagggactaaatgctttaaagatgtgaaaacacagttaaataactcgctgaagattacagacccattatgcatcgcaaatattatgcttcaaacatctgaagccggagctgaattctaaagtccatcctctgctacatcagtgcccgactcattaccagcttcacgccagacgtactctgaatcttctgccatcattaaagatggaagagatacccacaattatacctttgaaaatataacgcatgtaacacatttgtaagacatgggtctctattctgcatggtaccatgggatactgagagggtctaagttcaacaaatcccaaagagaacaaaatctaaacaaaacctacacttaacaaagtggggctgagaaggtggttcagtgagtaaaattgcttgctgacaaggatgaggacgtaaattcagatcccaagcatccatgaaaaagagagggaaagagagagagaaaaagaagcaagcaagctagatggagaaatgctcggtagcccagtactgtggcagcagacagatgaatccccagatctccccccccctccccgccctgcccccttcgtgcacacacatacacacactctgcattgcctgga

SEQ ID NO: 118 - DNA, 946 bp, Mus musculus
gcagaatgcctactacagagagcggcctgaccttcctgcaggacgagaacatggtgagcttcatcaagggcggcatcaaagtgcggaacagctaccagacttacaaggaactggatagcctcgtccagtcctcgcaatactctaagggagagagccacagacactttgaaggaggggtgaagcttggcgtaggagccttcaacctggattctgaggctgctggagtttgtgggttttcaggaaacaaggactatgggctgctgcagctggaggagggcgcgaccggacacagcttccgtgcagtgctgtgcgtcatgctgtgctgtgttatcacaccttcctcaccttcgtgctcggtactgggaatgtcaacatcgaggaggcagagaagctgctgaagccctacctgaaccgataccccaagggcgccatcttcctgttctttgctgggcggattgaagctatcaaaggaaatattgatgctgctgtccggcggtttgaggagtgctgcgaggcccagcagcactggaagcagtttcaccacatgtgctactgggagctgatgtggtgctttacctacaagggccagtggaaaatgggctacttctacgccgactgtgagcaaggagaactcctggtccaagcactacatctacatgaagggtgctaactcagcatgtgtgggcacggaagatacaagcattcggggacacaccgaggggagttattcagggcggccagggttgaagtcaagatgggggaactctaccacgagagggggtcggagacaagggaacttccccaaaccattctgggggccgcggcaatgggccccgacggtccggggtggagaccgcccgggggggggcccgggagatgctggggaagatcgcccacagggggtgagcggggagggcagcagaaagcgcgaaaaaacacacgctgg

SEQ ID NO: 119 - DNA, 630 bp, Mus musculus
ccacgcgtccgctgtgagcagcctccatgaggccctggaccagtgcatgacagccctggacctcttccttaccaaccagttctcagaagcactcagctacctcaaacccagaaccaaggagagcatgtatcactccctgacgtatgccaccatcctggagatgcaggccatgatgaccttcgacccccaggacatcctgcttgctggcaacatgatgaaagaagcgcagtcgctgtgtcagaggcatcgaaggaagtcttctatgacggactcattcagcaacctggtgcaccgtcctaccattgaccagttcacagaagaggaaatccacgcagaggtctgttatgcagaatgcctactacagagagcggccctgaccttcctgcaggacgagaacatggtgagcttcatcaagggcggcatcaaagtgcggaacagctaccagacttacaaggaactggatagcctcgtccagtcctcgcaatactctaagggagagagccacagacactttgaaggaggggtgaagcttggcgtaggagccttcaacctggatgccctccacacacccatgcctctgaccctacagacgctgtccatgcttcccaccaggattctgaggctgctgga

SEQ ID NO: 120 - DNA, 832 bp, Mus musculus
gccgcagcacctgggctgcgcctggcgtccggcgcgcgcagcgatgaccacggccagcggcccgggcgacctgccggcggggtctcctgtgagcagcctccatgaggccctggaccagtgcatgacagccctggacctcttccttaccaaccagttctcagaagcactcagctacctcaaacccagaaccaaggagagcatgtatcactccctgacgtatgccaccatcctggagatgcaggccatgatgaccttcgacccccaggacatcctgcttgctggcaacatgatgaaagaagcgcagtcgctgtgtcagaggcatcgaaggaagtcttctatgacggactcattcagcaacctggtgcaccgtcctaccattgaccagttcacagaaggtgtgcatccaagaggtcttctccagctttgactctggtggctccaggcccaggaaggggagggaagcgtggaacgggaggagagaaaagttattcattccagtgttcccaaggaggctgtgctacggccgaatgcctggcctttggcctttggaggaaggcttagtactggagaggcccagccacccaacattaccagctaagcatctggaagactgaaacgtggctttgctcctcagcccaggcgtgtttagaatgtgcctttgtgacttcatatgccccagagggaatgtggctttgcttgagcctcctggctaggaccccaggctttgttgttttctgttcctgcagaggaaatccagcagaggtctgttaatgcagaatggctactacacgagagcgggccctgaacctttcctgcaggacgagacacctgg

SEQ ID NO: 121 - DNA, 672 bp, Mus musculus
aataaaaaaaaagggcaattttagggatggtttgagaaggagagtgtgagctgcctgctagcggtgcgtgctaacccgcccgctttcccgccttctggtctctggcaaaacactggccccgttggggcaagcggttagaatgaatgtccacgcctgtctgcagaagctaggctttctccgctaacatggcccggcagtgaggttggaccgcgagatctcaggtctcctgtgagcagcctccatgaggccctggaccagtgcatgacagccctggacctcttccttaccaaccagttctcagaagcactcagctacctcaaacccagaaccaaggagagcatgtatcactccctgacgtatgccaccatcctggagatgcaggccatgatgaccttcgacccccaggacatcctgctggctgggcaacatgatgaaagaagcgcagtcgctgtgtcagaggcatcgaaggaagtcttctatgacggactcattcagcaacctggtgcaccgtcctaccatggaccagttcacagaagaggaaatccacgcagaggtctgttatgcagaatgcctactacagagagcggccctgaccttcctgcaggacgagaacatggtgagcttcatcaagggcggcatcaaagtgcggaacagtaccagacttaccaggaa

SEQ ID NO: 122 - DNA, 825 bp, Mus musculus
agcagtttcaccacatgtgctactgggagctgatgtggtgctttaccgtacaagggccaggggaaaatggcctacttctacgccgacctgctgagcaaggagaactcctggtccaaggccacctacatctacatgaaggctgcctacctcagcagtgtttgggaaggaagactacaagccattcggggacaatgaagtggagttattcagggccgtgccaggcttgaagctcaagattgctgggaaatctctacccacagagaagtttgctatccggaagtccaggcgctacctctccacccaacacccatctccttgccgatccctgcatctggaactgatgtacatctggaatggctatgctgtgattgggaagcagcacgacgactcacggatgggatgctggaggtcatcaccaaggctgaagagatgctggcaatgggcccagatgtgagtcccctgaggtgaatcggtcttgattcaactgtgtcctgggttcctgaggggctccctgagtaacttgcaggaagtgagcaagccataacttcttaggaaaaagctctatactcagagaatgagtactcaggagatgacgactgcttggttaaattgctgaaaggacatgatgtctgaaaatacctgggacgaatccaggaggacagaggagaatttcaggagcattgctgagcaaatgaaaaagaagattaaatatgaacaatgacttgaataccaaaatgcactactggaaatggacctgaatataatggaaacaggaagaaaatgagaaggacatgattatagagacgtgaaaggaaaagtaaagac

SEQ ID NO: 123 - DNA, 736 bp, Mus musculus
caaggcagaaatgaggaggccatcaaactcttagagtctgcaaagcaaaactacaagaactactccatggagtagttcttgtagtcaaggacacattttcgaatccaggcagccacactccaggccagatcttccctagaagatggcaacagatctctagtctcgtcagtgtccttgtagctttctgcagcactcttgggctgcacgatgaacagacagctagctggacagagcacctggaaacatttctaaagatcacctcccctgccctgcccttccttggggtccacctggtgctccagtaggattgcacaagaatatctgtgcagaagcaaagacagcatttttaccagtgtggccaaagccttcacacatacgggtacttgttttacactgtgatgtttaagagaatgtatgaacagtttacatttctttagaaatacatcgatgggattataattggtgtttaaaaaaccgaaaccaaacaaactaccccccccctccaaacaaacaaaagcaacccgactgcctggaaagctgtttagctcctgacctggaagttctctacatgctattaaaggccacactgcttctcagacctcagcttttgaggacaggggttcctagcatctgagtcattgcaaattccaggacagccacagctacgcagtgagacactgggtccaaacaaaataaagcaaattaagttgctaacatttaaaaaaacacaacacca

SEQ ID NO: 124 - DNA, 378 bp, Mus musculus
tctacacaggtcacatgaactcaaccgctcgagttttcgcatctgaaaaaaaaaatggcaattttagggattgtttgagaaggagagtgtgagctgcctgctagcggtgcgtgctaacccgcccgctttcccgccttctggtctcttgcaaaacactggccccgtttgggcaagcggttagaatgaatgtccacgcctgtctgcagaagctaggctttctccgctaacatggcccggcagtgaggctggaccgcgagatctcaggtgtggggccgggagctgaggcctagggaaggtggagaatttcccagcccgagtgggtggaggtgttggcagctccggtccgtgtctgcgccgatgctccaaggccgggctctc

SEQ ID NO: 125 - DNA, 613 bp, Mus musculus
ggagctgctgatgggcctcagggtgtgtgtcggagctggcctggtgcaaaactctctccttactgtggtttgagggtcaggattttcgtcagcggtctcctgtgagcagcctccatgaggccctggaccagtgcatgacagccctggacctcttccttaccaaccagttctcagaagcactcagctacctcaaacccagaaccaaggagagcatgtatcactccctgacgtatgccaccatcctggagatgcaggccatgatgaccttcgacccccaggacatcctgcttgctggcaacatgatgaaagaagcgcagtcgctgtgtcagaggcaccgaaggaagtcttctatgacggactcattcagcaacctggtgcaccgtcctaccattgaccagttcacagaagaggaaatccatgcagaggtctgttatgcagaatgcctactacagagagcggccctgaccttcctgcaggacgagaacatggtgagcttcatcaagggcggcatcaaagtgcggaacagctaccagacttacaaggaactggatagcctcgtccagtcctcgcaatactctaagggagagagccacagacactttgaaggaggggt

SEQ ID NO: 126 - DNA, 2334 bp, Mus musculus; identical to SEQ ID NO: 4

SEQ ID NO: 127 - DNA, 458 bp, Mus musculus
ccacggcagcgccagggcgacctgccggcggggtctcctgtgagcagcctcagcatgtttgggaaggaagactacaagccattcggggacaatgaagtggagttattcagggccgtgcaggcttgaagctcaagattgctgggaaatctctacccacagagaagtttgctatccggaagtccaggcgctacctctcccccaaccccatctccttgccgatccctgctctggaaatgatgtacatctggaatggctatgctgtgattgggaagcagccgacactcacggatgggatgctggaggtcatcaccaaggctgaagagatgctggcaatgggcccagagaatgagtactcagcagatgacgactgcttggttaaattgctgaaaggcctgtgtctgaaatacctgggccgaatccaggaggcagaggagaatttcaggagcatttctgccaat

SEQ ID NO: 128 - DNA, 522 bp, Mus musculus
gccgacactcacggatgggatgctggaggtcatcaccaaggctgaagagatgctggcaatgggcccagagaatgagtactcagcagatgacgactgcttggttaaattgctgaaaggcctgtgtctgaaatacctgggccgaatccaggaggcagaggagaatttcaggagcatttctgccaatgaaaagaagattaaatatgaccattacttgattccaaatgccctactggaactggccctgctatttatggagcaaggcagaaatgaggaggccatcaaactcttagagtctgcaaagcaaaactacaagaactactccatggagtcaaggacacattttcgaatccaggcagccacactccagtaggattgcacaagaatatctgtgcagaagcaaagacagcatttttaccagtgtggccaaagccttcacacatacgggtacttgttttacactgtgatgtttaagagaatgtatgaacagtttacatttctttagaaatacaaaaaaaaaaaaaa

SEQ ID NO: 129 - DNA, 2733 bp, Homo sapiens; identical to SEQ ID NO: 2

SEQ ID NO: 130 - DNA, 20 bp, Artificial Sequence
  synthetic oligonucleotide
tgcactggtccagggcctca

SEQ ID NO: 131 - DNA, 20 bp, Artificial Sequence
  synthetic oligonucleotide
cgcctggacttccggatagc

SEQ ID NO: 132 - DNA, 20 bp, Artificial Sequence
  synthetic oligonucleotide
gcatgtagagaacttccagg

SEQ ID NO: 133 - DNA, 20 bp, Artificial Sequence
  synthetic oligonucleotide
cacctgggtttgaggtagct

SEQ ID NO: 134 - DNA, 20 bp, Artificial Sequence
  synthetic oligonucleotide
tccttgctcagcaggtcggc

SEQ ID NO: 135 - DNA, 20 bp, Artificial Sequence
  synthetic oligonucleotide
tcggtgcctctgacacagcg

SEQ ID NO: 136 - DNA, 20 bp, Artificial Sequence
  synthetic oligonucleotide
gcctcagaatcctggtggga

SEQ ID NO: 137 - DNA, 20 bp, Artificial Sequence
  synthetic oligonucleotide
agttgggacccagaaggcct

SEQ ID NO: 138 - DNA, 20 bp, Artificial Sequence
  synthetic oligonucleotide
ccgcactttgatgccgccct

SEQ ID NO: 139 - DNA, 20 bp, Artificial Sequence
  synthetic oligonucleotide
tccatggagtagttcttgta

SEQ ID NO: 140 - DNA, 20 bp, Artificial Sequence
  primer
aagaaggctgagcgatttcg

SEQ ID NO: 141 - DNA, 24 bp, Artificial Sequence
  primer
tccacaagtagagcacttcaatgg

SEQ ID NO: 142 - DNA, 24 bp, Artificial Sequence
  probe
aagcaaaccccaaccagagcgctg

SEQ ID NO: 143 - DNA, 2401 bp, Mus musculus; identical to SEQ ID NO: 8

SEQ ID NO: 144 - DNA, 99000 bp, Mus musculus
tctcctggtgtcagaagatgctaaaatacatggctcacaggaggctgaactgaatagaggagtctgtctgcagttatcaggaagtgacactcggatgatgtagccactaagcatccacatggctgaggtggggacagaagggaaagctgggtgtttggccacaggtttggagctctggatatgccctcattctggaaaccccctctatgaaccagcaaatttgtttctccaaggcagattgagtcaggggtttctgttattgtaacaaagtgaccacagcagtgtgtgatgaaataacacttgcagtttcgtttctaggatgatggtagatgcagcactgtcaaacattggccaatcgcactaggggtttgtagaaaagaaatgagcagtttcctccagttctagctttccttctcttcctaccccaccccaacccccacccccaagtgctgaaggatgcgctcgggtaaatcctatctggtgcagtcaagtgcattgaagacccttcattttgcaggagagtatatgagtcccagggagtcaagtgtatgacaccctgctaatgttactcatctggatttccctttcttgtcaatgtcctatagtatgcatcatgaccttttaaatatctctgtgaactgctcttactgtttatcaaagatagcagtcaaccataattccccacctgctaggagaaggtgcaggcatgagcgacctttggagccacagctgcataaacgatctcttgggatttggggactgcctttgaatcccctttacattggggatttactgaagactaaacctccagtgtcataatggggagcaaactctctactgctgagccccacccatcacttttaaatactctttatatcttttaccactgagcagatttccaagtgtctgagtataatgcaaaaactagcctaatcattttgtatctgattaaatcctactctgtgtgtgtctaaggtgtgttacactgtgaatttctccctctgtttatgctggggagcaggacagctgctcaccccagttgttcaagagtgtcccgaagtttgtacaacccttgagataaaactagccccaaaggataactttgacctttctgattccttattaactgcagagccccaaatacaacttgtgtcacaaattccttgaaattctttttctgtctctctttccccagctataaatgcagcagaagaatgcgctctgtccccttccccaggtaggagagggacagctgactcccattttgacattttgacattgtcctcttgggtcacctctcttgttgccttgcttgtgcaaggacttgaggtggaaggctccacgtgtccaaagtccaggcagcctgagcaagggaagccatggccaggctgctcagcaccgaatgccgtagatgatatgaagccaggaacctcatgtggacttacagtccctaagatctatctaatgacttgctcatcaaaatgtatgcacacccaagtttattaaagaaaccctgtcttctgtgtcatttgggatctgctctctactggctcagtggctacagagccctcagcatccattcttatcaagatgtcattcaggtcttctggaaatgtcattaaatacactaaaaaaactaaagaggttgcagtctgaatgtcactgaaggtcagtgacaatgcttacaactgaagtcaaaattaaagggtcagtttgtaaagtcctctcagcatgagtgacgtgattcctaaattagatattattttcaggtggacatgtatttattttcttagtatttatttagtagttagtattccagtttcttgttaggaatttgttagcccagcagaagtatctgaatgtgcaattacacaacccagaggccgaagcaagagactgcagtgaattcaggactagttggggctacagagcaaagtctcaaagaattggcatgatcttacaacagttggatggtacattgtgtttgaggcatgggcctgttgtcctagctaggtgggaggtcagtcagggtgactgagcccaagagttgcaggccagcctgagcagaagaatcctgtaaaaaaggagaaagagaaggctgcagctgagcactgaccactatggcattacttttctgtgtcatggatgagcatgagataggagttagatggtcttgtaaggaatggtacagataacaaagctaacatttgtgatgagtttaaattacagtgcgtttatgtgcatttgtacttagctcactataatgttggatgttatatttggggtgatgtctagatctgagtatgaatggctttgagcccttcagcagggaagtttcttctatttaaagtgaatgagctctttggcagggaatatagtccatttcggcattaacataatcttagttgtaacagtattgtttaacggctgcaaaagtaaaggagagaacatttttaaaacccataaaccgattttttttgtgtgtgtctaaatggtgcacgcagaaaccaccagctcaccatcagaagagagactctaactctgattaaatcatcacccttggtgttttgctgacatttgcttatataaaaaccacagcttttctgtttcactggcatgggagtatagtcgtcagggtgctaagagaacacaccttaacagcttacttcttagcttttaaacatttagctacgtggcatatggatccctatctctctctggagctaatggtggtggtgggccctagcaagcggtccaggttctggaggccacgcccctgccgcccaactgcttgaggattggctgctttgggcctggtgggggccggctgggatccggacgaagttgggagtgactggcactggactcctaagggttctgacacgcgtggcccaagccaaagccacctgggtgtccagccgcgctccgtcgcagcaaaccaggagttctctgaccccgagttaagctctcctgcccctcccagtgcgtccagggttcatcctgtcctggagggttggccattggggcctcccgtgggtgtcctcagcctgggcgctagcctgggggcctctggggccggttccggggcctggaggggctgcaggaagcggaggtagctcgggacgcctggatcgaagcgggcgcagacacccgaaacggctggggtggccgcgagccggctgctgagtaatcccgggcggcgggtgggggcggccgggcgcccacgttccccgcgccgcagcccggcggcggctccgccttcgcgtccatccccgccccctgccggctgctgtgctctgctccccgcaggtcggagccgggctccgggagcgcgggccgctgcagccgcctcctccggcacctcgcctcggcccactcgaggcctcgtgtgcccatggccggctcggaggagcagtggccgcggcggagggaggacggcgacccggacgccgcagcggcgcccctgcaggacgcggagctggccttggctggcatcaatatgcttctcaacaacggcttcagggagtcggatcagcttttcaaacaatacaggtgactccggctcccctgactctctgccccgcctgcgcgcaccgggtggtcacttcgcgacctgtggctgctctcttccctgctccccttcgcttcccagggctttatctgcagcctttgccctgcgccttggccccatcctcctccccaccccatcccccgccgcgctgacccttccctccctatgaccgcagtacggcctcactttccgccctccgaggggtgtccagtatttctccactgctttcaagctgtcgcctggtctcccaccgcgcattggcccagggggctggctgatgcattagaggcagcagcgagcctggcacttgcagggttgggactctggctcgcgcgctgtcggggcagccagcctttgtgacctgagcacagcccactgcacccttgccaggtccttgtgtggcgctctcctttgtatataccccgacactcccggtgcttttgttatttaaagacagtgtagtgtattgtcgctctgaagaggaacttaaaacgtttcagcccaaactctcatcacccatctctgcctcatccttctaaaatcaagatgagttctgatgcctttcaagagagccgatttattaagaattatctagtaagaagaaaatagagggatttaaaaaatacgggagaatggaaggggaatcacgtgtgttgcgttaatttttgtttgcttttgaaaattaagctctaagccctgttgtgaaagaagccttgggaactcaaagcatccaggtgttctgcttcagaaagcaagctggcttacctgagagcctgcctggccatcaaatgcctagtagctgtcctcaacatgtttaagggcggctaccacagagtttcttcaggcccgtagtttagattgaaatgagcggctcccagtgtgatgggatgtagctgtgatggagaaagagtgtgttggtgaggaatgcttaggctttaaagaatggtggttgccaccaagcccactcactgcactcccaccgcaaagcaggtctcttacaactaggaactttccactaagtctgctttactttgttgttttggctttgagacatagcgtgctgtttgtagctcaggctagccttgctcctcttatctcagccccctcagggctagggttacaggcttgaactcccacaccttggccctacagcttgtttccttttaagtcagcttctcaccttgaggctctggaaagaacaacttaagaatgtcttatttaaaacacacagcacacacatacattcacacactatataagtttgatttaagcttcatcaaaggctttgatggaagattttttaaaagttactatgttagtgcttgcttgtaggttttaattaattaaataaataattaattaaaatttgttgagacaggctttcactacgtatccttggctggcctggaactaaccatataaacgaagcggcaatgccgttgccacactgaaggcaggcaacctagtctttatctccccggtgatcctcaacctgtgggttacaacccctttggcaaaactgtctccaaaaatatttatattgcgattcctagtagtagcaacattagagttatgaattagcagtggaaataattttatggttggtgattactacagcatgaggaattaaagggtcacagcattaggaaggtggagaagcactgtccaggcctatgggttgtcaacggagggctggtgctctgcgtagagcacagagatgcatcttgaatggaagtttttctgtagggaagacgaccaagcagtgcgtagcttggagctgtctactgccttttccagtgggaacggaaaataaggaagaaaaaaatactgtaatgtgtttgctgtgaagcccaagttcatgcacattccctcatgcctgccttctcactgctctcccccagccagagatggagactctgtcatcctcagggcccagcaccttgttctaagtcagactttgatctcactagtcttctctgttgctaagtgtgttcgatatttgcagtcggccccgggccttatttcccagcatgggtacaaagctgctgtcgggatggagggagagaagacagaatgactgacagcattatcctatcagttttcccttgctccatctgctgtgttggaatgtggaaagaccttgcattcctcccacctcccacattcgtgccgggaagctgggttgcatagaagaacgtccagggactggcaaccctcacccgggtccagcgctagccctgcccttttgtggatgcagacgttccagtttcttaaaacctgctccattgcctgtaaagcaaaagtagtagtaatagtacccgtagcacagtgtgactgcttgttaaacctaactggaagagagcagggacagggatgtggctcagttgagttcttgcccactgtgcatgaagtcttggattcaattcctgacaccacttgacctgggtgtggcggtggctgcatacaattccagctggaggatgggcagagggagcagaagcttgaggctgcttttggtttccatagtgaatgtgatcctggaatacaggagagagtcactgtctgtctgtctgtctccctctctgtctgtctctcctccctcccccaaccccccgcagcccctagtattaacaagaatccatgaaacttggcatcacctatcacacagtgaaagctgtgctgtctcaatgcttgttgcttagttcagcacagggcagaaggccccttttatgtggatagctctgatatttgtaatttaattacttctgcttggtttatttatttagtgcatgtggagggtgctgtgggtatcatcatgtgggacctggagatcgagctgagttccttgggctcggtgacaagcccctttaccacctgagtcatcttgacagtctagctcttcatacttctagcacttcatacactacatttaagggccagatgatgttttaagaaatgggctgctggaaactcagcattgacatcctgacagtgtttgagtgtcccatatggctcagctcatccacactggagggaacgagattcctagcgatttccttttcattgtcttctgagtgacttgtgctcccctttctggtaaaatgctctcctcagatgaacaaagaaacactgtgtatctagcattaaaagaacttgtttttagaggtcattttctcatgctacattaagatgaggcatttcatcagtaggtactgcttgtgcgatggcccacctcatagaaactgctcacagtaagacattctggatcgtataacacagatgttgttcctgtgaggattagaaatgtctgcacagtagagaccgtctccttatatgtcaacaagaccctggttggaggttgctaagagctattccttttgcaaatggcagaactcacgcaacgacaagatgcctgtggctggtgctcagccactgccaggcacagagaccagaacagctttgtgctgtgctgtgaatgtggttgtgtctctctgttccgttgaagttaaaggcctgactgttggaagaaaaggaacctttaggagatggttaaagacttggcacttttggaaggggaacctttagtaggtgggacctagtcagatgttaggttattgggggcttgaggttacttctcgtggtactctctggtagttctgaaaagtctgtcacaaaaggggtaagccttcttctacccatggcatatggctctattctcctaaaagcagccctcatgtattactgtgcaccccacccccagctccagccccaccccttactatggcatcaactgatccaggactttgaacctccatagcactgagctcaaggaacagtgtcaggtattttgtgacagtcagaaaaaactggctggctaatgccttgggactttgcagctttgagcctgaggccatgtttataagttgatggtactcctgttccagaggtcagtgctcttatgcaacagtccacaaactgaactcgtgttggcttctgtgacatgttcaaaccttggtgaaagtgcatgagagagtatcagtgttgtgctgtgcactgacttcagcagcgaggtgaggaaacactcacaggtcactggaatgtacaccagccagtgttgagcccagccagaggacattttacaaaggaaacactgtctgaacttcatgatgaggcaggagtaatccaggggaaggagaggagctgaggaagctgagaaggagaagtgagagatggtgtgggttaagctgagtctgggagaggagttggatacccagctaggggaagacttggagcgtccacactgcagttggctgagtagcagctgatgttgaatgggtggttcattctgtcttgctttcccctcgaccctgtcaggtcatgctgcctgtgagtcagtgctttctcttaggcatcacctcactgttcctgagacattgtgtgtttatgatgtcatggccataatctgctccttgggggctcctgggtcctaatgtcacacagtcatttcctaattttgacctgaatggtttttagtcagggtgctggtaggaaatggagcagacatgaagctgaggatggccagggacatatggaattccagtgagctttgtcatttccatagaacttaccggatgtttagcctccttccttccctaatggcaccagcacatcttttttatatttttggacaaggtctcatgtagcccaggctagcttcaaactttgtaacagaggtccagactatacttctgatctatccctatccctcctgtgtggtgaggtgacaagcatgccccaccacgtccagtttatgtcgtatagggatcaagggtggcatgcatgctaggagtcaatcgaccaattgagctactcccacctttctctgggcacctttttggtgtttttgttttgttttgttttgttacatttgtaggtcttattgtgacagtattgctaccaaattctggatgtggatattactgaaataataagcatattaaagaatatgctgaggatgaatagaattcttcattcaatcccaagcatgacagataaagtgtgcattggtcattaaacatttaccagtgataaatgcacacaaataagtaaggatgtgatagagaaagaagagagaggtgacattattaattctgcttttctttcccattttaaattataaaatggcaaaaaccattaaaagtaaagaaaactttgtggtaaataatgtttgtgtgtatatgtttgtaatgcatgtacagatgctaaactgctcagcacaggtataaaacgtgctatagagtcacgcatggtgtggctggatttgagagcgcgttactttggacctgggattattgctatgaggattgtttgctgttattcaggggttggaaaagactcggcctacaggccaagtctcgcttgttatctatctttgcaaatatagttttactggacgcagacccactcctgtggtcatggctggcctgtagctgcttgtatatcacaatttcatcaaaaggaaggtgtggaagaggccataatgctagcctttgtcaagtctgttgaccccaggtccaaaccgtagacattcttgggaaaattcaaagtaggagatgttgggctggtagggtccaggctttctccctgcccaacactgtgtcagatcattgaacggcaggacactgcgaggatgggcgtcttgggtgttcaggatagctcatccttacttctagagtctgtagagaaatccgtagatacagagatgaaagcaaagtgatgtgaggttagtgaaggaggtccatctgctgactcttctgtcttcttcccctcagtggtgtggctgtccgtaggctccgcttgatttcctgacgtaatttatgaaagtgtcctgattaaatactccttcaggattcatttagctgaagtggaattcttttaaaacatatatttgcccatagaatagtgggagggcctagaggaaattaataatccctcataagtacctacctcccaaaaccttaggttgtggcatgagtgcattcaggcatacgtacgtgtgtacacacactcaagtgtgcagattcacagttaaggatgcacctccagaaagtatgtatcgtcttgagccccttctactatgttaatggctacttcagttagacaacattcttcctctaactcagtggagtgaagctgtgtgcagttaatggagcttagatgaggctaagaaaatgagagagatacagtgtactgtggagacttttctggtctatttttttttttagataagttttaatttagttgagtatatgtgtgggtgggtatgtgcacatgtgagtgcaggtgccctcagaggccggtagagggtgtcagattcccctagaactggaattgagtttcctggcctagatactgggtaccaaacttggctcttgaacacgaacggtacttactttcaactgccgaggctgtaaaagttacagaagagaacccactgaagaaatctgctgttggggtgagttctcttggcagtacatgagccacttcctgccacccagggactccttcccaaaccaccagatcctggttgctctcagagctcctgtgctccagccccatttcccagcctccttcccactgcccttccccctgccatgcaccagagcagccggcattacccagcctgacgtgggcttccctgtgctcacttggcttccatccttagcctaccgtatctttttcattttattatttttaaatttttattattataaaataagtttgttaatctacatgtctattttattttattaaattatttattattattttattatatttattagttataatgaaattacacacttattgtgtctgtgtatgttaaaagtcagcgggcaacctttggggttggttttcttgtgtaggtccctgggattgaacttaggaggtcaggcttggcagcaagcctctctacgtatgaaccgtctctctggccctgtccttaccttcatccttccccatgttgcgttggcatccttacctcttgtctgcaggcaaggactcttgtcatagaggctttctgtgcacacaggctctgtagtgctggagtcttgcgaggtttcagaagtattaaagtacctccccaccaggcaccttctcatccctctggcaaccctgtgttaacagcaagcctgtttccttgggcctcttctccaccccaccccgaaggcttctacaaaagcccatggcctggttggtctgttctacttagtagctccttgcagagacctgctctgcagagatctccttcaacaggaccccagattctatgcatggggcacagctgagccagggtgaggagagatgacggtgtcacatctccgccactccacatggaggcaggagcctcaggaacagcaaggttgctcattcatttcagtggccctgcctctgggatgtgctgagagccacagacatgggctggagagatgactcagctggcaaaggccaggctcacagccagaaacacaagagtcataggaatgaagatcacaaaggcagcaagcctcacgagaaagttgccagagatcactggatatgcattcttaccttttgataaatgattgaatactggaaaccaacagcagccagagcaggtcgctgaggtcgtgcacaaggtagatggatgtatctatgctacctatgctgcacaaggctgatgacccgagtgtgattcccggaatccatgccacgttggaaggaaaggactgaccctacagaactgtcctcagacctctgcaaacatgccatggcatatctagttattataaaattaataactttgttaatccatatgtctctaatttttaaaaattatttaatatattaaaatcttatttattaattataattaaattatacacaaacatacatgcatgcacacacacatgcatactcatacacacacatatactcatacacacatatatacacacttacccacacatacacactcatacacagccacacacactctcacacacacacacacacacagacactactgcacatactcatatacacacattcttacacacagaccctctctctttcacacacgcacacacacacacacacacacacacacacacacacacacacacacacgtacagtgcctttgggagctctgcaaacctcctgttcctcacctgctgtaggcatgcctcctggtcctatatgaggcagaccagaacagccctacagttttagttctacctcccataaatagagagtagctcctgtttcgactcttccatcaggcctgtgccctctttggatggcaggcagtttatgatccccctttatggtctgaaaataagattgtcgcgtgaagcatcctatggtataaagaagtaaaacaaattcataatccaaataacatatattcccaaacactgatgcttggcctcctctcaccgaggatgtgcagtcaggacccatgccgtgctctgaagggtttggatatcaatggtgagaagcttttgcacacaggtagacagtggcagggccgtgcacaccagcagcaggacattgcagtcctttgctctatgttaatagaaaatggggtgatcctaacagagggagactccaggctgggcaagggagggaactaaagaaatggtattgttgccataggccaggctgcccttgtcaggggagtgtcaaaataaccaaattcccgtttaagaacacgggctataccctgaccagatgtcttggcgaacactttgtatcttgaaatcctacctccagtcaaggttgtagaagcctgcccctcctaggcattcaacttagatgatgaattgaagggttttgcaaggcagttggacattattagtatctgagtaaaattaaaaaataagaaccaagggctggagacatggctcagtggttaagagtagtgtactgctcttgttgaagacctaagttcagttccccaaacccatgtgaggttactcacagtcacccatagctccatctccaggggacctaacagcattttatggcctctggacacctgcattcatgtgcatacacccacacagtgacacatacataaacacatgattaaaaataataaaaatcttgtttaaaacaaccagttcccaatattcttaacaaaacttctacaaacacttcagaagttgacaaaagaaaaaagtcgaataattgcacttactggtgttcagcatttcatgtcttcggtaatgtatgggatgttgaatatattaaaggaggttataatatactgtttaaatcctagcatatgatacaaataaatgtagcgtagcggtgctgtggtgtgtgtccacctcaaaccacaagcagttcggctgttaggaacacagttgtcaaaccatgacaaagcatatctttgaatgttgcaatgaatgtggtgactctttgtgctcacagtttctacagcctagggataaaccaaccagggactgaaaatacatgatagggaagaatcccaggaatttctagaagacaaagttagcattttctgtgcatcaagtattgtgctgaattgacccaaatggagcaatgctgtggctctataggattataggtaatctaggtggctcaaggctattatggaaggtgcacatgggttatcggaaatactgagcatctgagccatgagacctggaactagtctccctgagaaccaggggcagtcatatccatttctgtgtaaatagaaatcggttccagagataatcaaagcagttttatatcttcataattttcaagaggtgctaacatgtgacagtgtgggatggagtccagagggctcacacactgcaggattgcgtgcatccgtggcgtgtcccgctgaagtgatagagagctcacacatggcagaatagcttgggtcagtgccagtggtcccacgggtttcttaatgccttaacgagaaacactaagacctggaggttcaggacaggctttcttgtctgtagtgaggccagggctgagaagagcagcacggtccgtgttcacgagcaggcttcagaagcgggagtctgcccaaggtgaagctgtggctgtctgagcttggtggaggatgaggaacctcagttacgtccgtggtcataggtacaagtttccctggggcatggagagcccacaggttagtcatctgaagcatcagtttttcctggtcacacacacgctacgtctaggtcccaaatagttcctagaagcattgtcagccctagttctcctgtcccttactgtgtacatgcagagccatgttaagaggcacccgccttccctaagaaggaagggtccctccttccttcttacccaatgcagaatcaaactgcgggccctgggcctcgctagccttaaagtctgtttcagaagcctggattctctaacctgttgtcgctttagtcttctcagctttgagcctcggtcagtcagggcactgacttaacaatgtttctcccaggtatccagtaagcttttttaaatgtcgtcatgcaaattaagacacagatttttaaaattaaaaggcccacatctccagaaaggagggcacatttgccaaaaagttacatagccttaaaggaccattttctcatgtgggggataggcctagtggtgactctgccctacttgtatttagaagcaatgacagtcccccaacccccccccctcccctcctatagaaaagagcaattcctctgctgtcactcacagtgtgacatcagctgcatgttagctcaacttgttcttacagataccctcgcacatcaagattccttgctgggtggagtgtttctggaaaaatctcccggcttgtctcaccacataaataccaggtctgctttagggctgtgtcctgccttgcctctaccccatgctccctgagttttacttaatgtaaagctaccataagattaccatcaaggacacacagattcaaagagccttatcccttgacctcagcattagtgaggctttttagtgcagttctagcatgacttgggggataacacaacattttgcatccaagttcaagtagaatttgctaagtgatagagactcctttaaaaagcagttgattaaagtcaagtctgtgctgtgtggcctctttagggttgttcccagtaggatgagtcaccgtgacaggctttgagtagcttttttatccacccctcattctgagcagtgaattgcaaaatctcaagttatgctttgtcagggaaatcgctggaatatcaagaaatgaacttgatactcttctgtcttacaaatcccactcgccttctctggttgaagtcaacctgaagcaggggttgagctcatcagatccatgtggtgggacaggactctagaatggagctgcctgcccctaaccctagcccacactggttgggagtaattgacttccacgtcacagtttcacgtttgtttaattgcttagaaaaagagttttgttcacatctgaaatgccatttgcttcagctgtcaaccacatatgtgatccaattttttgttgttatttccacattgatgattgatgatacccttagctgcttgaattatgaaaattgcagagtgagctaggattcactctcttgaaataacacagaaaaataaactagcaaaatgagcggagagaccacagaagtagacgtcagcccaaggagctcgactgacattgggcctgcagagggggacagttcagatgttcgttctttcttgttctgaaacaatcaccactggtgaagttcaccagtaacacagaagggggacacggatgggctgcacagtccctctcatgtcttgggcctggaatgggcttttgagagaagataatgaagcaggggagctttcctctgaataggataattttaggttgcaaaacaacaaaaactcatcacagagctattaatgtctaggaaattatggtggaggaatgaattttcagactaatgaagtaaacataaatggagttttcatgacccatgttctcctgagatgctctacaggaaatgtgtggctgtctcagggacacttacagagcccagactttgtcccaagaaacttagatttatcatgcggtatccagcttcactttgaactgagagagagaaagagagagagagagagagagagagagagagagagagagagagagagagagaggcagacagacagacagagggagagagggagagatctccacaagaggtctaatttgaattgttcatatcaacagatggatattttaaattataaaagcattgacacagtttgtaagttattgccacatatttaccttaaaggtaaaaataatgaaataccttgatcagttttgttgcttttttaaaatttactttacttttattactttgttcacatgggtgggcgtttttgtttgtatgtatgactcggtactgtgtgcatgcctggtgcctgtggagtccagaagagggctttagattccctactactggaattacagatgggtgtgagccaccgtgtaggtgttggcaatcgatgcaggtccgctggaaaagcatcttatgctcctaaccacatctccccagccccaatttccatagttttcaagtcctggttggaaggactgcagttagttggcacatgtggtttggctctcacctttggaaagtaaatatcagtgctctctctgtgtgctaattgcaaaggataaaagtgattcgattgcttatctactcatatgtgctaaggcagagaataaacaagaactagtggtaatgtatttgaaaggtatttaatacatgttaatgatttgggggaaaataaatgattggtattttacctccagaactattttcagaacatagcaacaactccagatgtccaccagggtgtagcaataactgaacatgaatagcaaaacttgagaggagcctgagtagagttgggcaggcttatacccatgtagcagactgctgcccttcccttgtaattgttggtgggcaaagcatggcagtgaatgagggtgaggtggttaatatgtgctcactgttgggctgcagagacagcttgcttagtaaacctcttgccatgcaagcatgatggcctcagctgatccctggtagctcgcatgcaaaacggctgggtgtgactgtgtgtgctgggaggcagaggcacagggcctcccgggcttcagtagccatccagcctagcttcagtcagagagctccagcacagaagagactcttctaagcaaacggacagacagaaggacggacaagaaaagagggctgacacttgagacctgaggagctaacctctagcctttagacagattgttgaaagagtacccttcctttgctggtgacacacaccgtacccaatgccagcactcaggaggcagaggcaaacggatctctaatttcaaggccagcctggtttagaccatgagttccaggacctccctctgtccccagttaaaataaaataaaaagctgttctgtcctcagttgagtgttcttcttggcttccttgctggtcgtcatttgatcacacaccctggaatttatttctgctccaaggttctatagtctgcctgtatgctgttggctgtttgctaagtctggtttgtagggagatttagggtcaggaagtgtgtgacgttcagcgttgtccatgtaaagactagttttgactacttggagtcagagattatatgattttaagatggattcttttctgcaaaaatataccattggcattttatcagtgattatgttaagtttgtagatggctttgggcaacacattaatatctcaatccatgaacatgggacatcttttccatccatatactggcaacttctttcatttctgtctagtgttttctagatttcttcatacaagtttttcacttggttaactttatttctaagtatctttatatttttggtgctacagtcaatgggatttctttttaaatatcattgtaagttttttattgtcagtgtatataaatgaaactgattttatattatttatatactgtaattttattattaaatttttattagttccaacagttctgtgaaatttttagggttttctacatacatctgtgaatagcaatgatgttattgttttccagtgaataccttcatttctgtttcttactcttttgttctggctgctgcttctagtgctgtgttgactgactggtgatgaaggtagacatgcatatcctgttccttatcctggaccagagttttcaaccactcaccattgcgttactgttagtgctttataatatttcttgaaaatattacgaaataattacaattttctcattagtgtgataaattgtatatgttaaacctatttgattctttaagtgcttaatctgtataattaggtaaaagttcaaattgatatctctcaattgttttaatcctaacatttattagacactctccatactgtttactcttcttgcacagggaccgacattgagttctcagcaaccatagcagctcacagctgcatgtaactccagttccagggagatctgatgcccccttctagtctccttgggcacgccactcacatgcacattgtctcctgacgaaacactatgtccaggttttttttaaaaatcaaaatctatagaaatatatttttttaaaaaaaaatgaaactttgggactggggagatggctcagtggataagagcactgactgctcttccaaatgtcctgggttcaaatcccagcaaccacatggtggctcacaaccacccataaggagatgtgacactctcttctggcacgtctgaagacagcttacagtgtgcttatgtataataataaataaatctttttaaaaaatggaaacttcaacattatttctatttataaattacatatttatggactacctattgggttaagctcaccttggcccatcctgggaagagatagaagtaagtcagactcatgctctgctttcaaagacccagcagatccgcacagcatgtatactttcgagtctcgtcatgagaagagaaacagtgggtgtatgattcagcttaggccttaccaagatgcccagggcggggtggcttggggaacacatttactccccagcagccctgggggctagggctccgcggtggagagttagcatggtcaggctccagcaacagtgttctctttggcttactgagggccatacccttaatgagtccttatgtggccttttctctgagcaccaggggaagtcagagtaggactctgctcctctgacctcaatcccttcctgaaagctctgccttcagttacagccacactgttgattaggaatggaagtggtgggggcagggaataggaggtggggtgatggcaaaatgtgagcatctcacagccacaaggatacggatatgtggcccttttggaggacctccttgcggagggttcccctcacccttcctatgagcccggaagatgggcactgtcatcacttcagtcagcagagggaggaggggagactcaggagaattgaattgttttctggggttggtcagtcagtcaggacttgaacccagagccttggaaaaggaggtttggcagaggagctgcctagagacagactagggaagcagtctgggggccaggcctgtgttttgttaggagtgaagtggccctgtaactgcacagatagatagctatgtattggaaggaactaagaagttgacatgtgtcgatgggggattcctattatgtgcaaagataccagtttgtagccttgtcccttgggaggtagtttggtgggtgttagtagaagagtaatgtagatgtaagagctattctgtggaaagcaaattctaggcttcaggttctaagttcatataggctgccagagcttacagtgcaagttgggtcccagtacccacatactagaacaaaagaacactcccacacccacccttctgataaaatttagactttacgttgttgttgttgtttttaaaaagctaattctagtggtggagcacacgtaagcgcgggatgaagaaaacaagctgcaaagccattgccagagccaggtcgagctctgccagggacgcgtgggggggaggattcagcaggtagacctgtgggactcctgggtctctgtttgatttggggttgtcaggggcaggaggaaggaggatttcaggatctgggccaccatttaatgatactgtctcccagagtggtgaaaggggagaaaaaaggaacgcagaaagccaggcaaactcgggtcattgagtgatgagagttctgttcctcgtgtgtcattaactaggacatgttaccccaggcagtgcacactccttgggaaagaagtgatcctagcatcggatgctgggaaagaacttgagtggaccaaagcgtattagaccctcttccaccaggatgggctaccagcaattgatgcatttcaaagccaggcaaagcaggcttactataaaaatgaaacaggggccagtaagcctttgattgtgacttttggtgtagggccaaggcctgcctttgtgagtttgaggatagattttctagttagcttttggtctgaagccacgcccgtcattgtccccagagtcttagtatcagggtccctaaagtggttttgcaagtctctgggttttctccctctcagcctaatcctaaagctaccttgaaagccatctgcccttttcaaagttttccaaagcttgtaattatttttttcacactaataatttgtaccctaatttgcatctgtttagacaataaacagtgaattatatagttccggccacaaggacaatgggcacaaaggctttggggaacgaaccccagatcattagccagtaatccaggaggagaaccaactcgattgagcattgactaggtgaagggcatctatttctctccctctaatactggttaatacagagacttaagagagcccagattagccaactgaatttctcctcccccgtccagtgtgtatgtatgtgtgtgtgtgcatgcgcaagtgcacaagcatgtacaaggacagttgcacacatccatttgaaaatggtagtgccatatttttcaaggctgccttctaaattacttgctgtgtataatatgatagttacacaaaaaaggaactagagtttacaggaagtattatgtaatagttaattgaaaatgagcctgacaatgaaatttgtctttcagtgaagtagcaaagtaagatgacttgaattggagaaagaatgaggtctgaggactggagttagtggagagaggtggctgcagtttgcatacgtaatttgcttctgaaatccagtttgcataggtaatttcataaggcatcagtaaaatggccatggcttcagagtgagcccaccagcctctggctctgccaaaagcacagctcattagagctttggaaaaagcaccctcttccctccattatcatagaaacttatttcccccagggatggaattaacattgaacagttagcacagggctggggacagtggcttctggaactgcttggctccaccttgcagtgggcttgtgactgacagagccctggtagctgactggctggggagaatgtgccaggcagtggcctaagggcatgttaacagttccatagaagccttgggaggggtctgccaggccacaagattgaaaactgaatgccacagttatcttgtctgtggtgttgtagtctgtaagtgttggacctcttctatcagttaggaacaacagggcctggtgggatgtgtgagatacctcattttcaggtttcctgacttgcctttgctactcaaatattacaaagtaaaattaaatcttgtactatttttttttttttttttgcttttatgtgtgagtgcacgtcgtgtgcgtacatgagtgtggaggccagaggtcaacctcaggtatccactttgagttttcggacaagacctctcactggtctagcctttcctgatgaggctaagctagctgaccagcaagcccagggtccctcctttctctgccttcagagtgctgtatccctagtggccaccctggctggctttgagtcagacgcaggtccatcgccatttcccttcagagccctagggaagtcagatgtcccaagcacagttgcccctgcagccaagtgctctgtgcgccttttcctttcccaagagccaccatgtcctccgttgatacacatcttgtctatctgtctgtattttgatttccccacgtttctaatcatagacaccatatggatctcagttttaaaaatacatatgattatctactttggtttgcacttttttatttatgaactctaacaatgttgatagatataaatcaagtgtaaattgcctttattttgtttgtttgcttggggttttgttgttttggtttttttggggggtttttgttgttgttgttttttagactgggtctctgctgtagctctggctggccctgaacttgctgtgtagactaagctgaccttgaactcatagaaatgtgccttcctctgcctcctacatacagtgctgggattgaagtcatgtactatcattcctggctgaattgtcattatttgaactattggataaagggttccatcacttgtatgaagaactcactattctaataactatttagatagttgccatttcctgaggctgtctcttattgcttcagtaaacatttttgtctatgtgtataaaatatctctagccatggagtgtttgggttgaagagccaatgctcctctatagtggcagatctcaaatgtttttacagagtgtttaggttattatttgtaaataataatttacttatcatttactatttataattcattaccatcaataaattatttgcaaatagctttatttgttaataataaaaataaaataaataataagtaagttattatttgtaaaaaatattttacagattataagtttctctttaatcacctcacatatgtgacatgattttaattttgaaatgtaagaagattaaccaagaagaaatatgtcctgtgctctgtgcattcctattgcattaataaaaaataggcccaataatatttaggagattagtgttttcagttagtcagccatttttgtatactaaaacattgagaatttacaaaggcaaagaaggcataggtttacaaagcagacctactgtaaaaaatgttgtgattagtagaattataaattagtaatttagttctagtggcagagtataaggctggattaagtggtggcagagcactcactggctggccagtctaatggagcattgaacaccagattcaatgatgggccctgccttaaaataaaataaatagtccagtttgttagagaaaaacacagtagcaaccttttgcctccacgtgcttatgtgtggtgagcatccatgtgcacactgcacacatgaacacagccctgggttcaatccccagcactgcctggatccattacattccaacttgaaaattatactgaagccattaagtgtcaggaatgagtaaaattaaatctgcccagtggcattgttctttatcccactctcttggacctaaacactgagtgacaggagtcacaaatactcaatcaacccaaggaaaaggttactaaagcgctcctccacccaagggaaggttagtaaagggctcctccacccaagggaaggttagtaaagggctcctccacccaagggaaggttagtaaagggctcctcccagcctgtgtaagtgggagatgatagggatggatacgatggatggatggatggatggacagaatggtggatggatggatatacaaacagacagctagattatagatagatactgagaagttgagactgattactgcttgtacccagttttctggcataatcaatttttgtatggacatggcctagcatggatgtaggcaataaataatataggagacatcatggggaaaagtcagatttttctcttccagatttggaagataggaagatggccagaggaggagataaatgagtggttgtttaattccacacttttgctgacctgaaccacagagcctacttggaaaaaggggaagagggcagttagtgaggggcagatggttgtaaggatgttagaggtctggcagaggtgatatcagcacacagaaagatggagcactacttctgagagtttggtgttgacccaagtctcaggggaggttctacagcagtcccagggtaagttgtggagcccttggtgttacaagtcaggagaagaacagagcatagcacaacggtgcggagaagaaaggcccgtgagaggccaggggccaaagatttcaaaaactgcgacaagcttctagaaacagaagcttaactggctaggccctctacatacaagactttatttgggggaagaaaatattatcaatatctttaaattttcctttgctgaaagggttgccttaggattcagagtatttcagccaggcatggagggcacataagaggcaagaaaattctaagttcaacctgggagacagacagatgggacagaggggggaatatgcatgcattttggaattttagtgaacacagatctgtatgccaatattttgagccccaaatcctaacagttacccataagaccttgctaggcttgacagcattcacctcatttagggtcttgatatacagtggagacccccaagccttccaccttgctgagaacctacaaaaagactcttgcatttcatgaaatgcaagcagctctgcctgccttctctgcccttttgtgacttaaaataataaacaaaattaattgtaattcgtctctcttagaaggctccggtaaatgccagagtacctagcactcacagcatccatgttaggattggatcgtggcttagcagagtatcttacagctaatgtttccacctgtaatttagtgtgagtagagaaagtagagtatttacttttctgattgactggacagaataactgacagcaactccttacaggaggaaggttctgcctggatcagagttcctagtcagtgttttattgatgtgaagagaaaccatgaccagtacaactgttataaaagaggcttgcttacagtttcagaggtttaatcatggtgtctttcatggcgcatgagaagtagctatcttagtcagggtttctattcctgcacaagcatcatgacaaaaagcaagttggggaggaaagggtttattcggcttacacttccatactgctgttcatcaccaaggaagtcattactggaactcaagcaggtcaggaagcaggagctgatgtagaggccatggagggatgttctttactggcttgcttccactggcttgctcagctagctttcttatagaacccaagactaccagtccagggatggtaccatccacaaggggccctccccccttgatcactagttgagaaaatgccttgcagctggatctcatggaggcattttcccaactgaaggtcttttctctgtaataactccagctgtgtcaaattgacacccaaaaccagccagtacaattgaccccttgtcaacttgacatacaaacacatcactagtaagcctcaacccttagttcttattcatccccaagatcttaaataactttaaaagtcccacagttgttacatattaaaagttaaatcctttaaaaatatccaatatcttttaaaatccaaagtctttttacaattaagtctcttaactgtgggatccactaaaatattttcttccttcaagagggaaaaatatcagggcacagtctcaatcagaagcaaaatttaaactccaaccgtccactgtctgggatccaactcacgatcttctgggctcctctaagggcttgggtcacttctccagccattccctttggagcacacacattgtctcctatgctccagctgcctgtagtccactgctgctgctgttcttgatggtcatttcatggtactggcatctccgaaacactgctgtctttcactgtaacttggcttcaacaatagcctctcataggctctcttcatggtgccaagcctcaactcctttgcatgaccccttcagtcctgggccatcaattgcaactgaggctgcaccttcaccaatggccttccatggcctctaacagtgccgagcctcagctgctctgcgtgaccccttcatgccttcaaaaccagtaccacctgggtaacacacattaccaagtccagccacagcacaaggtacaaccttggctatctctggaacacagcctctgtgctctcagaaaacacttcccagaagatgtcacccaatgatgctggtctcttcttaatcactgctaatttcttagctccaggtaaccagcatcaatagtcccagtactacaaaggctttactttactagttctggtatcttgttaatcacagctgattcttcagccccagctaaccagaaccacagaatcttcacaatccaaaataacagtggccctgaaaagagtctttaactttccctctgaaatttcacaagccaggcctccattttctacactgttctcaacattatcttccaagctcctatacaacatctctcaaagctcttaacactgaatggatcttctagctcaaagttccaaagtccttccacagtcctccccaaaacatggtcaggttgtcacaggaataccccactctgctagtaccaatttgtcttagtcagggtttctattcctgcacaaacattatgacaagaagcaagctggggaggaaaggatttattcggcttacacttccatactgctgttcattactaaagaaagtcaggactggaactcaagcaggtcaggaagcaggagctgatgcagaagccatggagggatgttctttactggcttgcttcccctggcttgctcagcctgctctcttatagaaccaagactaccagcccagggatggtcccacccacaaggagccctccccccttgatcactaattgagaaactgccttacagctggatctcatggaggcatttcctcaactgaagctcctttctctgtggtaactcaagctgtgtcaagttgacacccaaaaccagccagtacagtagctaagagttcttcatctctatctccaggcagcaggaagaaagtgaccctaaacttggcttgggctttggaaacctcagagcctaccccccccagtgacacactcctccaacaaggccacacttcctaaaaccccttctccattagtgccactccctgacaactaagcatttaaatgcatgggcatatggaggccattttattcaaactaccacaccatttgagaaggtgcagccttcgatggcaaggaagatccggcagccttcatgtcaatgggtgctcgctagggggactccaaagttgctgtcaatcaagaaccctagcttagagtcgctaggctggagcctacttactctggctagaccagacctcctgaaggttctgagactcctaaaacagcactacctagtcgggaccatgtgtaccaacacatcagcctgtgtgggttttcatccagacactggaacctgaaaacttcggatcccacaagcttggcctgtgcactttgcctcagtgccccttgtactctctcattgtgtcaccttgatagttattgtcactgtcagattgggccatggtaactagctctcagcatcctctccatggggccaggctccttctgcgtctcacttgcctatatattgatagaggatttctcttacccaggggtttttatcttggtagcaggggtggcgagcagctcctcttgcacttgtgtgtaccacagtgatgatattctgagctgtggaaatgttcctgctgactgactcatgtgctgagagtggaacagtttgtcccatatgctccttacggttaggattatgtcatcactaggagaggatgcagtaggctatttgccttgtggaacctgaggacaatttgaatatttaattcagacttctgggtaccattgcaggtatctgccatagataaagttgtatctcatttactgcactgcaacactgcaaatttaattacatatcttttcaatatataaagtatatgtataaattgaaatgattaaatatattatttttgttatttattcaaactctaattttattcaaattataaatttattcaaacttcaattacatttgaattttaattaaataaattctcatttaaatataattatcagataattatatttattatatattgttaaatatacttaaaagctttttaaaaaatctgtatggatgttttgcctgcatgtatgtctctgtatcacatgtgtgccttttgttctcagaaaccagaagaggatatcagattccctaaaattggagttatagatgtgaattactatgtgattctcttaacttctaagccatctctccatcccttaattagaaagctagatacacaggaaggtgacatgtaatttacaaaataagaccataagagcccttagtctatctagtgcctctaatagtcgttggcacagagaggttcttaaacaatatttgtgagattgcatgagaaactagataacttgcatatacctttttgctctctacaggaaactacctgtaatggccattaatcataagcaacagttttttgtttgcttgtgtgtttatatgatatagtttatcattttgtacctaccattttggctgtgaggctgaggtcacttctgtgatcaggtcaaaaattttaaactctgccttctcaaacactgtagagtgagtattccttagtcatgactatttttataataagtgggtaaatgataatttaggcgagtatatttaatttgtgtaacaatccattcttctcatctcactcttactcctggacctccctccacgtgttatcataggaaacccccttgggtagagatgttctggctacacatttgagtgcatagggctaaataagatgtttcctacttgtctgcagggaatgaagaccatttgaataggttttcttattgctttaaataattagattttgttttgctttgcttctttttgttgtttatgttactgttttgcctttgagatagggtctcagtatatatccctggctgggctagagctcactgtgtagaccaggctggcccctaactttacacagatagacccacctgcctctgcctcttgagtggcaacattaacaatactcactgccatacctagccttgatttttacctcacacagcctacctgatgctttgctggaatgtgtagctctccccaaataccagcatctctagttcataggacttttgacattgtgtgcacatgtttaaaaccttagcttaacatttttttttttttggtgtttttgagacagggtttctctgtgtaaccctggctgtcctggaactcactctgtagaccaggctggcctcaaactcagaaatccgcctgcctctgcctccctagtgctgggattaaaggcgtacaccaccaacgcccggctagtttaacaattttgacttcagagatgctcataagttaggaggttttatggatatacaacttaccctaacttgaatgtgcacttgctgtcactcgttctggaaaaatcacaatatccacatcattcttagatttatgtcacttttttctctccctcccatttctttcccattttttcttcatcttcctctgcctttcttcaaccatgtctttaaaaacaatttctctacattttaattatttgtgtggatgttcatgtggcacacacagcacatgtggaaaccagggagcagcttgtaggagtacattttcctcctgtcccatagctgtcgggattgaattcaggtcaactttggcctttactatggagccatcctgcagagagcagagagcacgcagaggagagcagggtgcattgcagcaggagcaaaaccagccctacatgcttgtggcttagttggataattaataattagtaaagcagctgaaggaggaaatgcctactgctagagtttagaatcctcatgtattgttataaaaattaataatgttgtattaaaaacagggccagtaatggaagaacacaattttttacactgtgcttgggataggtggtgcgtgcctattttatcttggtaggcagtgcttttggtcattctgtcgtcagctcacatgtgtaaataccatggactgtatgtatgactacatgtatgacttggtgatctgctcatgctggtgctacagtagaaatgtgagatttaatttaattttgtgctacgaataagccatcaactttggaaaacaagcacatcatatattttccaggtgcattcagaagttcagtggtgaataacctgcatgacattgttacagagtcttgtgaacagtgagcggctgggatggcatgttcatacgccctcctcctgggcacgcctttccgttcattgtagaagtgattacatttccttgttaacttccactttatagcatccagggctgctttgcagttgttttatttttattgatagatctctgtgcaagtacatgtgcttgcagatgcccatgtggctgcctgatgtaggtgctgggaactgaactctgtcctctacaagagtagcaagacttcttaaccaccaagcaatctctccaacgtctcttccttctccttagatatcttttcttttttcctttttgtaatgcaaggtttgtttttactctgggtttgactatcactattgtggaatatattttgtaaaaatactatttaaacttttagattgtattttgttggtgttgggtttttgttttgttttgttttgttttgtgtgtgtgtgtttatagatggtgtctggctgacctaaaacacatggtagcccaagctggcctggaactcagcctcccaaatgctaggattacaggtgagggcacttccatcatacccacccataacataagccattgaattataaaattatagttacaaataagataccagtgcataattatgtagttaagatgtgtttgaaaacttaaaggctttacaattccatcgtagaaagactggctcctggagctgccatgtggtacccatttaggctatatttagctgagtgggtaaggactgttcttttccgaatgacagtggtgggaagctcctgggagaggcaggaaatcattttaagcaatttatatgctccaaagactggcaagaagacatcctctcagggatagcttcttaggaatagtgaggatttttgtttacttaaactacttccttattcatcactttgcctcctgctgtgcctgctcactgccgatcactgtttcaattactcaataaaccatatcacaacacagaaaggtgcagaaacagttaatgggtgatggatgatcgagccatccccaataccagatgcaggcactctttccttaggatttgcgttcattccctcatccattcacgagctagcttgtcagcaagagcaccccagaccctggcatgggcaccaagctggtgtgacatgctctgaagggtgggggctcagcagcatcgacatccaagagggggctcccactctcatccaagagaccaggaactgtatggacctgagtgtttgtctagaagcctggaggcagagcaggagctgttgagggatggaaggacttggccagtgagtggcctgggtggggatgctgtctgtatgtcaaagccctaggccggagaccaaggcctttcccctggcccagcctagggttcccacgtgaggaactagaggcttaaaagggagtgtttgagtggcatggtcatagatctgccttcttagagctcattcagtggctttgaggaacaacttgccatggccattctggtttgaatgggtttggccaccatagattcgtgtgtttcagtgcttgaccgtagggagtggcattattaggaggagtggccttgttggaataggtgtggtcttgttggaggaagtgtgtcaaaaaggcaggctttgaggccttctatgctcaagctccatccagtgtggaattccagtccctcctggctgcctttggatcaagatgtagaactcctggctcctctggtgccatatctgcctgcacactgccacacttctcaccatggtggtaacagaccaatactctgaaacttgtaagccaccctcaaataagtgtttgcctttataagaattgccttagtcatagtgtctctttacagcaatgaaacccgacacatcatctttcattattcttaatgattgatcttaaagtttttttcagttggcatataatgtcggtgggcattgtggaatacttatgattagatgcctgtatgctgtacataatgggcacccagggcaattatccttctttatcatgcagactgtaggatgcactgctcagaactgttgcctggagaaagcaaccatcaaaggcctagttatgtttgttgaggtagcagtgcagcatccaggctcctggttagcttaccctgttcctctgtggggaggaggtccagagtcctgcttctcacatcctgtcttgcccagcctgctccaggtcatcagcatccctgttcccagtacaaagcagatcttgctcatacctaacctagcacaccccccctccagcctttatgaccccctcctctttctcctcctcttcttttttaataaccactgagtctaactagtgctgcctgcatgcacctgtgtgtgcgaccatctaccaggagcatgggcagcctaccggtggccatacaccagaggcgacattctcactccatgccagcagctagcagttgccagttgtccccagctggagatggaacctgttgagctcctcccacatcctgttggaaggctggctggctcaaccttgtgggttcttgaatgcagtagcccattttacaacatccttccccattcctcaactcttacgtcttatctgccatgtcttccccagtgttccctgtagcttgggggtagatttgatagatgtacgcttaagttgagtagccagcattcacttcttctttgaccagttatgagtctgtattgactgcttcccactgctaaaggaagatgctctgacgggggttcagagcagcgctactctatgggtgtgaacatactggggaagcactttgacagcatgactgctttgaaagtgacagcaggaaatgggaaatgtcccctgaagacctaggacaatcccatccatggattttgaccaggtttttttttaatcaattgggcatgaattccctcttgtggatcaggctgcaagtccaatcagaaagtagatgattatccccatagtattcatgccattgttgccctgacaagtccactgggacttttttcccccagtggccttaatcaccttcaatcaagtttggaaagaattaacatcattttatttagttttattatttgaggcaggtcttatgtgacccagtttggtctccaaatcgctgtgtaaccaaggctgaccttgaactcctcctgaatcctgggattgcgaatatgcatagtcagccccgcttaccccacagtggagatcacacagggccttgtgcaggccagacaacactctgtcagctgagggatatttccagtcctagcgctgacattttaatccttccccagaagtgggccttcaagtgagtgcagtggccatcaaggagacttactggttttaggattttatcatctggtcccgcatggttccaaagggacatgcctcaggcatggttccaaagggacatgcctcaggcgctgcccggcccgagctctctagagctgctgatgagtaccggaggtgtcaggagtactttaaaccgagatgctttcagaacaaattaggttttcccctctgaatatttttctactacaaattaagttaggaaaattcctttaagcgacccttacgttgaatgtgcttagctgccttaggaaaggagacattttctttgtaccgttggcttagagtcattgtcgtttgttacttttactcatttgttgtgtgttaggggtggaggggacacaccacagacacgcacaacatgcttgtggaagccagggacactttgtgggtgttggttctctcctaacatgtcagtcctagggatagaactcaaatcgtcagcttggctgcaagcttttttactgctgagcacttttcttggcccagaggttcaacactttggactgaaaatggctgtagtgagaatcaaccaagtttctgctaactctggggtgaagattgagaccccgtgctgctttggggctgtttactgccattatttaattctcctgggggcctttctccaagtagggcagagcaaagacctcctcaagctccccttaagcctaacagggctgtgtgcccactcatgcgtctcttcccaggtgaaagaggctctcctcagcaggcatctgtcagatggtccagttggaaatgtccccactttccctggccgtcttggaatggatggcgaggacttgtgtggtgccagtgagcacttccaagctctgacagtagctgctcacatgcttcctttagagatgctgccccaccatcaggttgagactgaggcctctgtgttagcatgtgacagcttccttacagtgtgctcagagagcttgaaatgcaggacgtgacagatggaactcacaggccaatggtggcggggggaagggggctacacaaagactgtgacatggtcaaagcaattgttttagcttccagttctgacctcatcaaattccttattgtaaattcgtttatttattattcttgacagtgtcatggactcagcttagtgaaggaatgattttacatcaaaagagatactttgtttaaggtgcgacttagctgaaatcctaaggaaatgtttgttgtgtttgtgagactaaagacttattggttgtcttccccttcactcaatcttcctttctttttattttatgggtatacataaaagttcttatgtatattaccttgtagctaatattaaaagagagagagagagagctctctaaatcatgattgtattttttaggggaaaaaaaaaatcagagagggactggagttaagggccagcagttaagaatctacatttctcctctgggcccacagggtaccagcactcacacatctacataacccccacacacaaatggtttacacagaatttaaaataaatatttttttaaaagaaagaaaaatatgagaaggtgtcttggagtgaaacctcctatcagcgtctttctctgtcctttttgggcctggtgttctcctaaccctgggccacagatggctccagccagccctcagcttgccacagagtaagcatctcactcccacagcagcagagtctgcctcagcccatctcgttaccggtggatggcctcccctgttgggagttgcagaggctacagctgaatctcaaggagtgtttggagctagcacacttacatgagtggtgtatcgtctttctgaaaggggagtaactgtgggggcgttcatgccgcatgtgacactggcactgtgtaggctctgctgtctgtctcccccaccccatacacacttttgattatattttcattttttaaatttatttttaattgaaatcatcattagttttcttgtcctttttatccctttggctcctccttcccccagcgaatcgcacacacccacaccactctcaagtaatgacctctttttctttgactgttaatgttatatacacacatctgcaagcctatgtatgcacagctacatgaataccacgtacttactggaaatacccttcatctcatcgtctcagaaaacaaatattttcacttttctctgtgcatttctgttggaatatgctagtcacagctcttctatttctacattaaagtactttaaacaattttagctcaaattattttccatcactattttattttttttacatagtctcttgaagttcagtctggtttcaaacttacaatgtaacagagggtgatattagacttctgaccctctacctctcttccggaagtgctgggattccaggctctgctgtcatctcccttccccattcttctctctttccttcccccctctccctcctcttcccctctttccttcctccacctctccccctcccctgccctctctccttgagttatcttatgatgacaccctggttccattgcagacagctggtttctttttgttgtaggaagaaaatttcaaactggcaaaatatatactacattattttatcatcttagccattcttctgttatttcatatgtcagggtgtttggcctgtgtatgtgtgtgtgtgtgtgtgtgtgtgtgtgtgtgtgtgtgtgcatgcctactgcttgaggatcaagtcagaagaggtcatcggatcccctggaactggagtcacagtgagctgccgcttgggactgggaatctaacccaggtcctctggactagcagccagtgctcttaacaccggaggcaggcatctctctagctcccatcttggccatttttaagtgtatagtttgatagaaaatgcattcatattgtttgttgtcttagtcagggtttctattcctgcacaaacatcatgacaagaagcaagttggggaggaaaggagttatttggcttacacttccatattgctgttcatcaccaaggaagtcattactggaactcaagcaggtcaggaagcaggagctgatgcagagaccatggagggatgttctttactggcttgcttcccctggcttgctcagcctgctcttttataaaacccaagactaccagcccagagatggcaccacccacaaggggacctccccccttcatcactagttgagaaaatgtcccacagctggatctcatggagacatttctccaactgtagctcgtttctctgtgataactccagctgtgtcaagttgacacacagaaccagccaggacatttgtcaagcaatctgcagacttgttcccaccttgtaaaactacaactccatccctgtaaacactcacactcctccgccaccccagccccagtaaccaccattgtcctctctgtgggtttgcctatgccgcgtaccttatgcaagaaaaatcaaggtacatttgtggttttgtgacgagtatttctcaacctagcctgtatcttcttcaaagtccatccatgtagtagcaagctttagaatgcccgcctgtgttttgagcgggaagaaggttctgtgtgtgcctatactccctttccttgcctgctcatccctcctggacacatggagtgcccccgccactgggaatcaggccgccgtggaacttggatgtgcaagtacattttgagtcttgctttccattgtggggtgagtaggcagggaggatttctgcactgtatcgcaaatctattggtaattgttttgaagcataccaacattgtccatagttactgacactatctcctagactcccagctgcacacgtgtatgtgtatgactctgcgtgtgtctgtgtgtctgagggtatgtatgccatagtgtgtttgtagagatcagagacaactttgtggagtcatttttctcctcccacctttacatatgttcttgggattgaactggactttccaggcttgtgcagcaagcccctctaccgactgagccatcttgccagtccttgagtcattcttatggtgggcttttggttttgccatgttaggttgtgggtacccttcccagcctctggctatgacaacctatgagacgggatttgcagctagtccttctagttcatggtctgcctgtggcagcactgttgactgtgtcctttggtgcacagaagttggtgattttaacctagttcaaattatctttcatttttctttattacctgtgatttctgtgttatggccacaaaaccagaaacaccaggctggtatgccggcagtctctgtttttcaagacaaggtccagaggctcacccctgagcgggtgaatggtgctcatctgctgactgggttcagggtccagcttcttctgtctcacacaggcttcatgccctccaacattcggagagaagaaaagtcactttgaaaaagccttctaagaacttaacatatgaattcagaacatttttaggaaaaaaaaaaatcaaaggcttgaaattttccagctgttcactttgagtggtaaaattgcatttgaagaggtgtagctcaccaggggctgcctgaaagttatgttcatttatcttgtggaaaaatattcctttaagaattaagtgtaaagctggcaccactcggttcagccagtgaaggggcctcccactacagctgctgacctgagttcagtccctgggactcatactgggaaaggagagaaactgtcctccacacaggcaccttcgcaagcttgcagccccataccccaggcactgatgcactcaaaacaaagataaactttaatttaaaaatgaaaagcaattcattgtataatttcctttccactgtatttctgagaacaaaccctgatcagttgggtttggaatatcctggagaaatttcaaagaattccatcccttgaaatgttgctcagcacgggggcagatggcatattgcttccttgggttcataataggctctctacttttagtgatgcactgtggtagaaggaagaaattcagacacattttatgagtgaaagttcactttcaaaactaaactgtggtggtaaacacaaggaggcattcatcagcgtgttccaaaagacatcatttttcttggagggggcacgtttttgtttttactttggaaattttcgcttcttgtgactataatagtctgtctgaggtgggatgacttaaaaatgggtttattttgctcacagtttcaggaggttcagggacctagcatgggcctcaggttagttccagcaagggtcctctgtgcttcatcgcaccatgggagacaccaagagagggaacagggggcacacagccgatcaggaagcagagagactgcagaggtcaaactcaaccttctagtgtagttctcgttggatcatcaaccagggcccaggaggtctacctggatctgagtgacctgggacctctgaaaggttctgtatcgacatcatcagagtgaggaccacatttccaaagcatggacttcagggaagcaaaccatagcccatctccaacttgtgtaatgaattgtagtatctgcctcaaatgaactcaattattatgacactcttctctgtacttttggctattatgctttgaggggaggcagccccagaacaaagacttactggttttaaatgctaagaatacccctgttggaaaacagacatgctggcatttagctcataggagagttctgtgttctcagtgtaaggtacttcctgtccctgtcagaaatcttcctagataattaatggtttattaatactgtcaagggtagtttgatatcttgccttctaattgtatatgtatatatgtctgtgtatgtgtttgtatgtctttctgtgtgtatatatacctatatatgtgtctttatgtctgtgtatgcatatatgtgttctgtttcctgtgttctagaattatttttcttgtttccattgtttggtgtgccttatgttggaaactctgttgttgcccacccctaacccccacccctttccctgtatagctcttccttgttgtggaagaatgaagaatctgttccatgatgtcgcctacagggtagctctggccagttctgttgtcatgatgggtggttattgaatttcttctgtttcctgtcttcatgattgctgcctgtgtgtctttgggacccacagagtaaagaggctccagttgtcttagttgctgttgagggaagttcccttcccctcctcagccacttcaagtccttagagaacaggcagggtcactgcccactgcctccctcccctatttacgtttgatcagttttcaaaataatgggttggttttctagggtcctatgtcatgtgaaatgtttcctgtgtgctcaagtgtttcagcagtggatctccagctggtacaattgttttagggactgtgggatctttgggactaagaactatagagcttagctaggctgttgaggagtaagcctgatcctcttctagtctgtctctgcctctggtctttacctttctctaaatgtaaacttctgtcctctgtgactgtcagtcagaatgggtttcttctcctggaagttgctgctgttgggggtttgctcacaataactggtacattttttatccttttaatggaaaagtttaattagcttggcttatactgacttgtttccatacatttccccctcaaagatggcaaaacattttcttcatcggatagtaggaacctctttaagagcatagtattggtttttcttaaaattccttactcagtgctgtagctaggcactccaggctcttcttgcacctcatctggaaccggtgtggtgtttcatgggggagacacagtgtgttcagcagtgtatttagggagggtgccgactacccacatggctgctgggcttattatacacagctgagcagtgaacattgtttctcgactttgcagaggacagaaccaggaaacagatccattgctaaagactgaaaatacacactgagtttgcatggacgctggcagtttgtattctgaactggctccgtgggtaaacgcaacagctgcttttccagaggacctgggttcaattcctagcacatacatggtgccttataaccatctgtaacttcagttctgtgggatccagctcccccttctggccttctcaagcactgcacccggtgcatggacatgatatgcaagcaaaacatatacataaaataaaaataaaggaaaatgttatttagtataaagtcattggctttaattgtgtatcacaaaactatgtcttcaccattgtagaaaacttgtcctgcaaggatgtgactgctagaaacaggttagacttgtggagtagagtgtctgaggagggccattgctgaggacattgcagaacaggaatccactgtcagatttacatgccttctaagtctgttggttatgtcacccgagctgctgctgcctggattttcatgtttaaggggtgtgtttgtgtttgtgtgtaactttttaaaaagatttatttaatgtatgtaagtacaccgtccctctcttatgagacaccagaagaggtcatcagatcccattacagatggttgtgagccaccatgtggttgctggaaattcaactcaggacctctggaagagcagtcagtgctcttaaccgctgagccatctctccagtccccatgtgtaattttttttttttgagacaggtcttatgtagcccaggctagctcacatcttgagctcccagtcctcgcctctccttccaggtgcagagattgcaggtgtttgccctatcacatggcctatatgtgtctggatgggcattgaactcaggcctagtgaatactagtcaagtattttaccagtgtccacagtcctaaatacctgtttttcaaacaaatgttggggctttcctgccaccatggggtcctcaagtgactaaccttgatttcagtagaacatgcttcctgcctcagccctgggatttcagtaattatcctcatatctttggattcattttaaaatccaaagattttaaaatccccaagacctgttttgtatagggacatttgtacatgccagagttaagtaagatgaagtaagttagtgttgggttgttgggtgccgggcatgggcgaataaagggagtgggagaaaacccacgtcccgccagagctccagtgatctgggtgggtggaggattcccacacgctttccacatggccccaggtaggtgtctggctgtgggaagctatagacccagtcctcggggttcagggggaggtggacaagggacagtcggaggtctctggacctcacagaggccagagataacaggttctcagtttcgggcatctcagacaccgctggataccacagaagacctgagaacaaaatgggggccccaggggcggctcggtcaatcccagagcagaagggaggagagagcagggggaaaggggagctgggtggttcccatgcaggcgagagtccttggtcctgtctgtggctggagagcgggaaggccttcctgcaggaggctctttaggggaaagtcgttcaagcatggtgggccttgatgagcagagacagtctatggttttagaactttattatagaaggcagggaaagaggccagccatggccacgtggagagagaggggaagggagagagagaaggagggctagagatgagagtaagaaaggtgagagcttaaagagagagaggaggggccaagcagctcctttatcaagatgaaggtaactgtgggggtggagtctagccagaatgccagaagcttggggctttatctgtatgactgatagtcacagaattatggagttgggagctctgtggtgtcaggcccctgtctctgggaatgtgactcactgttccgtcccatttagagttttctactgggtcactggagcaagcctcattcaaccaaaacaggctgcctttctcggtcccacattgggtcacttgaagtatgtgaaattaaaggctgagtggacccagcaagggaagctgggtagactgagccgtgccgctaacagggctgtggagctaggctgacaggacagcagcttgtgccccatgtgcccatgctggatggcggaggggcaggacctcagggagggaaagtgcctcggctggacaggtgccagcatcttttcttccatttaaatgataagacagcgtgtgaggtaacaggagggagacttggcgccatgaataattaattcctgtggttctcaggaagctaattttagccaagatcatgaagcaaaagtagcagtggctgaactgcaatcaggatggggaagcagagcggccattactatgctgaaatccatcaaatcatctgtccttgagagcagtgacctcactccctctctgacccggtcctccaatgcctgctgtgtaagacatcaggatgcagttgatacaggacctagaaacctgtgcggcatctaagctctaggtgatgctgcagaacgagaagcagcagcatatgtttggagggcactgtagtcatgacagagctcccagctaggttaggcatctaagtgctgttttgggttcttggcaagtgagctgaccttccagtttgttgccacggttgattcaagcatcctgttaagtggcggggacaggggaagcaacttgaaggccaacatagagtgagcagcagtgcagataggtggggaaaggtactaggagaggttagctttggaaatcgttttaattgtggagtctcccccaacaacacaacctcacaaagcccactgcaagaaaagaaggagatatgcatgtattttgactgtggtagtctgtctcaagaacagatttgttattgcctgcaaacatatctatgtagggtattcctcaggcagagatgtgggcattcatatatacaagggctcactttctttctttttctttctttcactcacacacacacacacacacacacacacatactccatacacacacacacaacccttttcatgttgggcataatgtaaattttttttctttctttcttttttttttttttcacaatgtgaatttttagtggatggaatagtacgttgttacatgagttacatgacttttgtcgttgttaatataatggccctgtatttgcatagtgaaaaatgagtgacttttttattattatttaagagcacttggctttgttttcctgttacacaatttgtggagatctggattttgtattagtttttagtttggattgaagactttatgttcttgcatgtttgtgactcacttagcactggcttgctttcttcttgtgcttactacaagattagtgatgcctgtgtttcacagttgggaattagtgggtcttggtgaggcgttctcaaccttgggatgagttggagggtgtaggtccagtgacaacatcctttgatctgttctacaaataagactgactttatgcttgttagatgttttctgttttgtttcgacccaggatcttgcttatggctagcttgggtaaactccgccgtggtcctccagcttcagccttccaagcactgcaggcctgcaccaccatggccaccccttattgtaaagcttggattcagctttgtgcttagcagcagatcagcaccttcctttggccatgatctagcaaatctttctatttatatctttatatttactgtcagctccttagtgttataattttacactgagacctcccttgcttttgaagaatcaaagatggagtctctcttggtcgcagagccaggaagtacctcagctcttcaacttcttggtgtaatttactagtgaatggggtgcggtctatgtaatgatatatcctaattaccaaatgcttttatagtaagacttctagtgaaatatttttgtttgttctttaacagaaatcatagtccactaatgagttttggagccagcttcgtcagctttttggtaagttgatatcaaaagagatattgctgtcaagaaaataaattcaaagtgatgcctatttactaccagctgtatagacatactgttaaagaaaacttaaagttattacccattatttaatgtctgtgagataagtgttctcccccaagtataaaaaaaaatgcgtatatatgatttttagagggttatattttccccagcttgagatatgtttttagaataaaaatctaattgaaagctcttcaaagcttaagattgtattgtgacaagaagaaaggtcttggtaaggaagttaacaacagcctagagatgagtttgtgagctaaactaaagcagtttaatacttgagagtggaagacacgagttacagtagtgttattcagtcagctggtcaatataggaggatgcttttgtttctctgaaatgcttgtcacataagctactttcacacatgttgtcttaaagatcatcataggattgcataatggagaaaatgtactgagtcaaaactaaagggagagaaaacgtccattcaggaatgagaaagagtagccagtgggcatgttgtggccagcccgcctggcccttagccagcacccaatgctgggttctcatttatgctattgatcttttcttaatggaacccaggttttaaggcctcctctttgcaggaacactagccctatacctatgggaaggctgttgtagatggggaaggtaacatttgtctctgtcttggttactttccctgtggctgtgatcaaacacaagtcaaaagcaactgaagaaacagtttgctgtggaacagtttgaccttagagtccataatggttggggctgtatcagggaatgatggatgcttttgtttagctcactttctcctttttatagacagtccaggatccctgcgcagggaatggagccacccacaatgatcaggtcttcctaccctagttaaccttatcaaaataatactccatagacctgcccagaggccttcctcccaagtgattttagagcttatcaatttgaagttgagattagccatcacagtacccaagtgacaatgagaaagggcacggacacagagacagagggtcttggctgaggtctgaggaggaggaatggaaggggatgccctagcaaggctgagattttagtggcctaaattaggatggctggaaggagagcgtgccccgggcaaaggtgactgaggtctgttttggtgagaatgggaatgtcgattagagtcataccaaaggaaccttaaatgtcatacctacccagtggacaatgaaaagatagagacaccgggacaccagagacaccagcatagccaatagggtctccagagagctgggtgccccgcgcctgctgcctgttcagaccagacctcagttctttctcaggtgttttggttcctggcggaggcaggagaagcagatgttcagggtcatccttatctgcagattgactttaagaccagcatgggctacatgagacaactttcaaaaaccaagcaaacagatagcccactgttgtactgggtgcatgtcagaagtgctcattagacatcaaggagtggctgtagatcatgcaaagtcaattccttgcaggtaaacctgccctcgggagctcctgtctctggcaagactgatttcccaatggcattttctaactgttcttttatgagtattcttggttcagtatttgaagccaaggctccatcagtggatagaatgaattttttaaagtggcactgctataaaaactgaattgaataggtcaatcaaaaatgatagtttctactatgtttgagttttaaagagtataaaacacaaggacattcaccactgtataatttttcatgctggaataattgagatataaagtcttattttctactaagattataggttttttaatgaccagggtgtcctgtaacagtgcgtgaacctttttacctgagaatcactgaggtggtttttctagtttggcattttatggtaacggcctgaggttcccatgcctgctgactcaccggtcctttctctgttccctggaagaacgccatgatgacattcgaggaggagaaaatgcagttggcgtgcgatgacttaaagactacagagaagctgtgtgagagtgaagaggctggtgtaatcgaaacaattaagaacaaaattaagaagaacgtaagtggatcggcttgtggaccacgtcttgtctgtagagcatggctcactgacttgggtttggaatctaggatatgaccgaaattagacaccaattgtctgccatggcttctggttaagtactatgtctcttagagtagaagaagccccttcagtcatgatagccatctcttgcctgtgcttagagtgggtgtgatagtttaaatgtcagcttgccacctcctcagatcattggagaagagaccataagttgaggaattctctagatcaggctggcctgtgggcatgtctgtggcagattgtcttggtttttaatatatgtaaaaatatctagaccattgtaggtggagccattccctaatcggggccgctgagccatatgagatgggagagagctagatgaaagttagaggcaagccggcagcatggagcatttgtgtctccctgctcgccacccttttccctgagttgcttttgcttaggttactttagctcaacaacagaaatgaaagtagcacagctttgaggtggagactcctgaagtgagggtttcctgggtgtgactaaacaggcaaggacagtagctgacagagcagtcacacattggtatgttcttggcatccagctgttgacctaagtgtccccaggagatgctggcctttagttataatcaaagtctcagtaagctcacagtccaggctgggagttagctcacctgtgacgtgcttgtgtgtctgcacgagcacctgagtttgaacccacagagaaagccaggcgtgatggcatgcaggtgtaatcccagcacaggggaagtcacccgagcctaaccagtctcaaaaagcaaggtgttgtggtgagatgcctcactgagaaaagtcacttgctgccaaatctgacaacctgggttcaattggcagggcccccaagatggaagaggaaaagtaaccacacagttttctctggcccctacatgtatgctgtggtgtacacacatgtacactcatgtacatgcaggcaggcatgcccgcatgcacataaataagtacaatttaaatttaaaaacaagacaagatggaccatgtctgaggaggagccatgcctggcgtgacctccacacatacgtgaacacacatggacacaaacacacaaaaggtcataagacacgtgtttagaatttgcttttaccattcactgcaatttgtgtgaagctcttgagaggcagttgctctaactgcctgagtttcatatgtcacacctgtgacttaacggttgtagccatcaagtgcccagcttttcctttgcttcatcaggtgagccctgaccggtcaagcagccattagtgatggctgtgtctatggattacaggagggcactaccacacctgccttttacgtggcttttgatctagaactcagcccatcatcttgtgcacttagcactttaacctgctgatctctctccctgaatcagtattgtctctcattctttgtttcttcgtaaatgtcatcctcctgcctccagtactctcctgcctgaggctctaagccctgctgggttgtctgctgggggttcccatagtcagacaacagaagtgtagtacttactattgcatggtaacaaaatctctgttaaccgtaagctcactccatgcctggcactcattcctacactgctaacatccgagatgagccagccttacagtgtggaaggcagcgtcatctgtgtgagttctcagccctctggcaaccctgtgtcagagacgctattgctggaagtaaaggggagtgcagacacatttttcccttccagtgactgctagggctggacatggagcaacggtgaccatgatgggttgtgttaagtttagtcaggtgagggagatgtcgttcttttgtatttaccacatacactattgacatgcatgttagaacgtgtcactttttctagcaccgtgaggccatacacagtcacttcaaatagcctgttctgtgggcacttactgttaaggtgggagtctgcatcaaagtgactttttcattccatttagaagcacccgtatgacaaaggccagtattaaaaatataatttgactttttgcttgtctttacttacgtctcttaaatttcaggtatggtttctgatttagtccaaggtagctttttgtttgtggatatattctgactaatgaatggatatgcagcattttctcacccttgcatattagttaaaaacagtgacggatacaccctaatatcagtggtccctgaacccagatggctggaaaacgaccttccaggatttgctgtgtggaatgtaatatacatggatatctttcattttacactaaataaaactatattatctgaaaaaacgatggattgcttactaggtttttttctttgctttttaaatatttttcataaattccattttgaccatttacaatatggggttaaattacagtattctctaggactacaagttgttgacagagtagagggaggggagcatgggacccccccagcctctggtgtagcttggctttgactttgagtggtccccagggttcaccatcccgtgggaagtcattccgtcctggcagagccgcctgacctggcagagccgcctgagcagatgttgggaggctgtgctttcctcgagtgtgatttacgacgttctcgtcacaacacaggttgatgcccggaaatccaccccctccatggtcgatcgacttcagaggcagatcatcatcgctgactgccaggtttacctggcagtgctttcctttgtgaaacaagagttgtcgggtaagtggacgcagtttctagtgacacccgctggtaatctgtcacaaccagggagtcttcatcttttcttgttttgttacttagactttgaaaactaagcacagggtgacagcacttttggggagctgttagcgatttgttacttaggagatggaaactgtgggtgtttaatgtgtgtgcagcagagtcatttcatcctgaggtctgcagtacagtcagtcttcagccttgataattgtgtctttcttatagaagtcgctgatgtctttgatatgtcggggcctatgagagtaccttgctcaccaagtcatgaatattattcttcaaaatgaaaccaaactggtttgcatttcagattctcaggaaattgttttaagcccctgcagtatcaagtgtatcagaaaggacttcacactgtacttgagagcctggtgttgcagagagcttggcaaagggtgcaccctgtgctgagtgcacgctggtctgacaagggtgcacactgtgctgagtgcacgctggtctaacaagggtgcaccctgtgctgagtgcacgctggtctgacaagggtgcaccctgtgctgagtgcaccctggtctgacaagggtgctcactgtgctgagtgcacgctgtgctgagtgcaccctggtctgacaagggtgctcactgtgctgagtgcacgctgtgctgagtgcaccctggtctgacaagggtgctcactgtgctgagtgcacgctgtgctgagtgcaccctggtctgacaagggtgctcactgtgctgagtgcacgctggtctgacaagggtgtaccctgtgctgagtgcatgctggtctgacaagggtgctttcctccagcctcttgctgacttcatttcttgactaggagttcagatgcatctgggatagcatgctgtgagctgagttcctggtctggtgatgtctcttggatcctgacagcagaaacctgtcacttggctggacagaatttatgtatggggagtggggggaagagaagagaagactaagtagaaatcaattcaaattcatactcagaaacacatttcctcccaaacattaaatgacaaggacatttcttcggtgaaatacactgaaagtcatttttctccctttcttctgtttccatttctgtcttctgcttgctgctgcttctgttcagcttcagttgaaagggaatttaacggttactctgatgtctaacatttgaacttccaaacacttatccttcttttacactacatcctacgatgtgttttcaccctttgctctggtcttccccctccccagcccgtggctctctcgcccccctcccccacccccagcagcttcctaacaaggtagctctaacatgttaagggatcatggtgtgactctcctataaggcataaagatgaagtaccccactcccaccctgatccgcctccctgccaaatccgaactgtgcatgcctgagacttaggggctgcttcaggcaggatgagagttcttcatctcctgttgttttggcattcatcttctgatgcccaagttctttgaggaactcatcttagccattaagaaaatgcttcctgggctggagagatggctcagcggctaagactgctctaccagaggtcctgagttcaattcccagcaaccacatggtggctcacaaccatctgtaataggatccagtgccctcttctggtgtgtctgaagacagcaacagtgtactcacatacattaaataaataaataaataaatacttttaaaaagaaaagggttcaggaccggcccctgcagggaaaaaatactcctctgtctccctggtccccacctaattttattttatttttatttctgtgtctcagtgtggttatgcacatgttgagtgaaggtatgatcggagccagaagagggcatcaggtccctctgggctggagttaaagttgcagtgaggcctgacatgggtgctgggtacagggtgctgggtgctgagctgagtcttttgaaagtgcagtactcattcttagccaccagccatctctccagccctgagatcctgccttgtaaagaccagggcttatgcattacaagggaagggccaagcagatgcagtgaggtgtttgcagattgccatgtctgctgttgtattcttggcattatgaccactcagctggctttttttccttccttccttccttccttccttccttccttccttccttccttccttccttccttcctccctccctccctccctccctccctccctccctccctccctcccttcctttcttcttctctccaagggagacaaccacatcttccttctttgtcagtgagtcctgctgcgacattttctctgcccctcagtctggctgtttgtgctgccaccttgtagcctcacagtgcaggtttctcagacctttcctgacatgctttgtgttgccagtgtcactagccccactcaaggctcctggagacaaaccaggatgtggtccacccatgcttcaaacacttagctggcctgtgtcaccagtgagatagagccaagtccctctcctgtggcaggtcggaacagccccctcctggcattctgcatgcgcattcctcaagcttctttgaaaggacctggaagcttgtgtcttagctcacactgcctgcccatctagaaacacttcagctccttcgaattcctctcctgcccagtcaagtgtgtcccaagccttcctctttcctcatgggcctcatcagtctggcctgggtgatgagaagcgggtaccttcttgcagccgggtgagcagctatcatctggtgatctacatgttcacttctgaacctgcctccatgtcagactgagggtaggaactgatagtcccccctgcccatgtgttctgcacttcctaggtgtctggctttctgagatgacaggtgctggtgaccagagatgagggagggtgggttttagtctgaggaaattcttgatgtactggggtgggctaaggacgtaaattctacctcagaagcctgggaccagcagacagggttacagaggtggcacaggtggttctgacccatggggaaggccaaaggtctctggtcctgtcacctctgtgcttataaagaatgaactaggtggggagtggggctaagtgctagcctctaatcccagcaatttggaggctgaggtagaaggatcagacattcaaggctggctagggccacaacgccaggctgctcaaaaccaaaacaaatgaaacagaacaacaacaaattggcccatttcttgtctgtcccggatgcatggttgatgtcactccccagcatgggggcagtgtgtgctctgtgaatgaaagagggagcaggatgccactcagggaataaattgccagtgaaacatgaaacagtaagtctattagaagtctactgtctgtgggtgaggacaactaagtcacccattgttggactgggaatataagtcagggtaaagcgcttgcttcacagacatgaggactggagttctatccccagaacccacatggaactctaggcatctgggcatgggctatcctcccggctgtgatgggaaggtggagataggtgggcttctgaggcccactctcacccactcagcgagctccacactctcttcaagaaagtagacaacaggcctactagaaacaatactaagggtgtcgtctggccttcacacacacatgctcacactccacacaaccatgcatacacccccaggcaaacacttacacacatgcacatgtgcacaccccacacaaccatgcacccccccatgcaaacacttacacacatgcacatgtgcacaccccacacaaccatgcatacacccccatgcaaacacttacacacatgcacatatgcacaccccacacaaccatgcacccccccatgtaaacatttagatatgcacataaacacatgcatatgtgcacctatgcacacacgtttcattttttttcttcaaactctgttacctgggtctcaggaaggacgagggtgaccatgcctgacccttcattgtgaggctcccagccttcttaggacgcatggttaggtgaggcctaaggcagatgctcttgccatggagaatgacaagattcctgccaaggtcaatgtagtataatgggatgctttcattttcctaggagttgccctttccaggaaggacttccactcctgtgtgtggtgggacttcctgaagcccctccctctctccctgcagattggccctcacaaatggtctgtggtttcctgctccttctgccttctcctctggcccagagagatcacagcctgtctcctctttcccaagtttctgtagccagtcagcttttcccttggctggacttgaacctgtggctctcagtatctttcactgtattccacctatgtcccaggccttgtcaccttgtcacacacctgctccctcttccctgctgcctcctcatcgtaaaccaagagtctgtttcctttaataagggaaatgtgaggtaaacagagctgagtttccctttctcattttccagataaggatgggggaagcagggaggaaggaatttacttgttacatggggggaagaatgtttaggaagtaaaatggagcattttaccccaagctcagggtttgtctaggtgggggcaaaaaaaaatcactgcaggtcctgaagaagagatttgtaaaagacatctacttttctgggttttacctagattagtgtctgaggtggcggtgtgtccctgcagtaagctctgttacaatgaactaaatacgatgtttcaagcagctgttagtttcataatgagacatttagccaggctttggatatttatgtttgttattacatttatttatttggtttatgcaaggagtggggaaatgcacgcctcagtgcctgtggggatcaaaagccaacatgtagggatcagcactccctcccaccatgtgggtccctggggtcagactcaagtcctcagggtcagggcgggagccttttcccctcccctgccctcccttccccctcccctcccctgccctcctcccccctcccctcccctcccttcccctccgttttgaagagtttgctaacagcagcagcagcagcagcagcagcccacacccttcttacatgtgctgcctgttagtaggaaatgtctaagtccgtggcccagctgaggttgaacgatagctaataacagtaagttttcccgaatctgctctccatttctgtccagcttcttgccaatcatcctgtatcatgatgtgaatgcaaaggttcttgctgggttttgaatccctctctccccttctcttcatagcctacataaaaggtgggtggatccttaggaaagcctggaagatttacagtaagtgctatgtggacatcaacgcccttcaggaactgtatcagaagaagctgacggaagagcccttggcttctgatgctgcaaatgataaccacgttgtggccgaaggggtgaccgaggagtccttaagcagactgaaaggggctgtgagctttggatatggccttttccacctttgcatatccatggtgcccccaaacctgctcaaaatcatcaacctgctgggctttcctggagaccgcctacagggcctttcttcactgacgtatgcgagcgaaagtaaggacatgaaggcccctttagctacgtgagtagctatattgcaatgctttggtagataatgtagtattggaaatagctaaacagcactgcagactttaagagaggcttcgggggaaatgccgcttggttgataatgatgctgtgcctgtcatgcagtgtcaaggagcgtgttctgtgctgctggggaaagatagtcctgttaactgagagctgaggcactgctttgaaacctcctgagtcctgtatttgttagttctttattttttatgtgtgtgtgtttatgcacacataagtttatgtgtatgcatgtttatgcacacataggtttatatgtgtgtgtttgtgcatgtggggtatatatgcacctgtatgtggaaaccaaagaacaactttgagtcccatcctcagagagaatctctcattggcttagagctgacctagtagtctgggctggccggcctgccggcacctcccacactgaagacgtatgcatgtgctgccaggtccatgtttttatgtggattctggggattgaccttgcatccgcattcttggggacttggcactttcccagttgagccctttcccctgccggccccaagtccaatgctttgaatggtgagctgacccattgtccagtgtccagtactttataagtcttttgcttttcccacagtctctcagatgtacatttctgattttaattgaatttgaggtcaaattttgtgtggttctgaaatttttgtccttacaaagaatgcaaatattgagtaataatctcccttggtgattctggttacttggtgtagtatatgaggtttagatgtctcccagtatccctctaaattgagtcatgttaaaattaaaatgattaaaactttttttcttaaagaaaggacatgattttagagtttcagtcagggggggggggtggtctgtttagtggttgagagcacttagtgctcttacagaggactcaggtttagttcccagcaccagcatggcagctcacaaccttgtgttaccagttccagagactctgatgccctctcctggcctccatgggcactgcacagtaaaagaaactatatttgtgccaacaaaacacacccatacacttagaaagaaagaaaccttaacattctcttctggaaaacaaccactgttcccatttgaagctgtgtgagcaggtgctggccttgtttgtctgacaagacactgtcttggcaaacatttttccctactctctgatgtagagacgtcagagagatgcagttctgatgttagcactgaaggggttggcagtcatgtaacaatcatgaagacagctgtagccctgacaggcactaaggtctacaaccggtgtcctttactaattagtatcattaacaagtgtgtaacttgtgggtattccatgcttatggcttagtattgttttacgtttatctcaggaaaggggattggaattaattctgcagattaatgtgttctccataaggggattagatttactgccgcactagatgtgacatcacatgaaggtatttgatgcactggttaaatcctgtgcatgtttattaaagcagatctcagtgctgattctaccctctatgtgcctagcttaatttaactaacttgaacttgaataatttttgataatttatttatagtgtctaacatcttcaaagactagggaaagggcctttaatctgttcctctcaggtattttatgattataaataatatgtgatggattctacatttaaatctagactctggcttacaccataattttgttgttgttgttgttgttgttgttgttgttgttgttgttgttgttgttgttaggctgactgtgtagtccttgctatgtagaccaggctgcctggaacacacacaagtctgcctgtcttttgcctctcagtgctgggattaaaggtgtctgctgcttgtaccctggtttttataaacgcagcaggagccacaaaaatgtaaaagcttttggacagtaagttggtggtgactgtctctgttctgtagaatccagatgcttctgttagtaacaaaacagctggaggctccggaaaagctacctgcttctgctatctgcccttgtctcagaacaggggactgctgattgacaccttgtgctataacatatcaatttcccagataaagacagacataaacatggggaagcgctcggattgtactttttgggaagagtcggtttggggagagcatgtactgacttttattttgaaaacagaagccatgtctctgaagtcttgctcatggcctccctctctccctgtctccctgcagattagccctgctgtggtaccacactgtggtccgcccattttttgctttggacggcagtgacaacaaagggggcttggatgaagctaaggcaattcttctcagaaaggaatctgcttaccccaactcttccctcttcatgtttttcaagggacggatccagcggttagaggtatggcaccttcctcagcttttatagtgaactttggactaccatgcctctgttttctgctcagggacattttgtatgtgccagaataccattggccaggtacatcgtgtaccctggtgataccttcaggtcacagaaaaggataatgggatccaagagggcttctgatcacttcctgagatttccgcacatgagcccaggctgtccctctccaaacccagaccatgccctggctgggcagggccccacttctccgtgtctttcatcttgttcagggtgaggaggatttgcgggacaatgaagaggttgcagagacatctgaatgaaggtggctgctctcactgcaagaaccacccattgtgttactaggagttttcaaataaaccagttgggtgttttacagtctctgccctccaactgtatgtacctccatccgtcagaagtcagcctcaagcaaccccagtggatgatgggggtttctgcttgtgcactgcttcccgggcatggggtggtttgggtttctcctttctgttcggttgccttctgttggtttggcggtgttatagtatcccagtgttccagggtcacacagaagccttctgcagtcttccattcttcatgcagtagctcttacatctgagccgtgagacagccctctaactctggttctccctgtactgaagatactgggctttggggttctgtaattgttgtttacggctttgtgtgtgtgtgtgtgtgtgtgtgtgtgtgtgtgtgtacgggaattcacgtgtgcacatgcgtggtttgggggccgaggctgtgctatgacgtatgtgagaggtcagagggcaacatcgtggagtcagctctcccggtacttgagctcacattcctgttgccagacctcagtgcctttgcccctgagctgcctctgctgctgtgagatcttttgtctgcagcactgggagttgaatccaggccctgtgcatgttaagcaggtgcccttccagtgagtggcaaactcagtccactctgtgaacttaattctccaagctctgggtgttgtacagagagaaaatgtgttttagaaattgctgtgtagtccaggttggcctggaactcaccacatagcccaggcaagcccttaactcacttcagtcttcttgccctgacttcctaagtattgggatcacaggcgtgctccctcttgcctaaatatgagattacactgataatttaattgtgaagcatagtagaaacatgcacatttgatggctaagtgagtctacctcactgtcttaaaacttttccctcgtctcatctgtgagcttaagagtcctcctttcttctccttttctgaaaatgtagttctgctctgtggtgacagggatgtgagtggcttctataagctcatatgctgtgatatttgctcccagttggaagagctgttgggcagagattaggagacatggccttgttggaggaagtgtgtctctgggagcgggctttgagatttcaaaagagtggtgtctttccttgttagccctaggcctcctgattgatccgagaggcgaggtctcagcttccatccctaccaccatgtctttgctctgccaccttggactctaaccctctggaaccacaagcccagttaagtgctccctttataggttggcttgggtgtggtgttttgtcacaggcagataagatagcagaaaaaatggatgcagctcctacgctgtggactgtttgggaaggttcttttctttcagatatgagacctacccgtagggagcaatgtcaggttactgcagttcctctggcccctcaaattcatgcaggaaaaaataatattgaaacaggagatagaaaatgtggagactgtcttctctaggggtcattttcaagatgggagtgtgtgtctcagtgtgtgcctgtgtatgagtgtatatggatgtgtgtttttctgtgtgcctgtgtgtgtgtgtgtgtgtagatatgtgtatgtgtatatgtgtctgtgtgtgcctgtgtatgagtgtatgtggatgtgtgtgtctgtgtgtgcctgtgtggatgtggatgtgtgtgtgtgtgtgtgtgtgtgtgtacacatgtgcagaagttatgcatatgaatactagtacctttggaagctagaatcattagatctccctgaagtgcagtttcaggaggctgggtgccacctcacatggagactggcagttcaacttgtgccctcttagagcagtgaatgtccttgtaacgtctgcgccttctctagtccattgattatttggcagttcaacttgtgccctcttagagcagtgaatgtccttgtaacgtctgagccttctctagtccattgattatttggcagttcaacttgtgccctcttagagcagtgaatgtccttgtaacctctgagccttctctagtccattgattatttttaaagtattagggacagtctgtattctaatgaactgtcatatttctctaggtttaatttccctttaagaaatacagattcgtacatttccatcagcattaacaatcaaaattgcatgattttgtgtgtgtgtgttatttggttctgtgtatgctttcatactttgtgaatattttcatagttaatagaatgtgtcacttagtagcatggctcctttttagtattatttatctccaagtaaatgtccaactattcagttgaatatgtgagcatttcataggctcttattttgaaagcatctcctggactcttgctcatacttatgactacgtcctgatgagaactttgagtttcatgtttgaaagttgaatttctggcctaatcctactgtgcaaattggcatactgtgcaagtttattaaacaatccaggggaatcagtgtgtgttgggaagggaagatcctagatccctcctcatggcagccggcatgggatccttcttctgaaggcagctctgaagagatacaaaagacgagattctagattgagacactagcgtttagcagtgtcctggatcaggtgcagtgtccttccttctgtgcctatgccagcgaggcctgatccaggattccctaccttaacaagagcatccattgtgtgctctaatccattctgtaagctgacataggatttacatgcaacctttttatacattctctatgcactgtagtctctacatacctatagtacaccatgcagatgttaactaaatagcttgctttactgtttgtttaggggaaaaaaagtgtgtacaggtacaatttaagatgtatgaatttgtgtttgattgaatctacaggtagggccccacagtgcagaacctgaggatagagtctgtgctggaattttgatgtgatactaaagaggttcgtttctttacagacacatttttatgtcaaacgtgatagtagagagctgaatttttaaaatgcaaatgcatttaaagaagaagctatgtacttgtggccaggagacctgaaatgagtgcataggagagaccactagagctgtgcctggcaggcccccttgccaaagcccagtgctcccctttccatagccctagtgctccccttgccatagccccagtgctccccttgccataaccccagtgctccccttgccatagccccagtgctccccttgccataaccccagtgctccccttgccatagccccagtgcttactaaagctgtgcctggcaggcccccttgccatagccccagtgcatacctcatgaggacagagtagacgttgctagggccaaagagccatcatggacattcattcattctctctctctctctctctctctctctctctctctctctctctctcaataagtatttgtttttattttatgtgtatgaatgttttgcctacctatgtctgagcaccctgtgcatgcagtaccctgggggaccagatgagggcatcagatccccctctggaagtagagctacaggttgtgagcagccccacccctcccgtgtgggagctgagtcagggtcatctgaagagccaccagtgctgaatggcagaaggcaccatctgtatggcacatgattcctgagagccagaagcagcctgagcagatgtggctcactgatagcttaggcagcacacacagaccagcaccctgtacaagtgcatacaacatacttgagtgtgccacacacatgtatagacatacagtccatgtagctgaagagatggctcagacattaagaacactggctactttttgtggggactagggttaagttcccagcacccacatcagggagcccacagtcccgtaattctagctccaggggattctgtgccctcgtctggtctccacagacaattgcattgtatgtatgtgcacaatacacacacagaaaaaggaatgcatgaatacatatttgaaatgataaggtagatgtacagacagtgccctgcttctggaaccttcctgtgcaaccatcagggaagtgttgggatctgtctgtggttggtttcttgtaagaggcagtgttgtgcctgcctgacctgctgtcctttggactccctgccagagcctctgccttgagcaaggcacagtaagggacatccacctcccagcagtgccagcaggggctcctctggaggctgacctttacttcatggcacctggtatcccagttccttcctggagggggagggccaggtgcttacctctggtctctacagctctgcctaagaggatctcttcacacgctgaccactggagtgtgatccctgctggctctgcccctcttgtggacttggtatttgcaggtgtcgtcaagaggagcatgtcctcgttagctgtaactgtcaacttggcacaacctaggagaaaatctcctctgaggaattaccaagatcagattggcatatctctgtccttatctgtgaggggcgaggtcatcttgattgttgattgacctgggaaggcccatccaccatgagtggcaccacagctgctccttcctgggctgaatggcaaggctggctaagcatgaacttctgagtgagccagcaagcaacagtcttgttttgttttgttttgttttgttttgttttgttttgttttgttttgttttgttttttgagacagggtttctctgtgtagccctggctgtcctggaactcacactgtagaccaggctgaactcgaactcaaatccgcctgcctctgtctcccaagtgctgggattaaaggcgtgcaccaccactgcccggcgcaacattcttctatggttgcacttcaggtccctgctcgagttcctgcttgacccctctcaggaatggactgtgatctggaagggtgagccagatgaaccctgccctcccccaagctgcttttcgtcagagtgctgtaacagcagcagaaaggaaagtagggcatgaggggacttttttacggtggctacaatactttcactgtatacttctgtttaaattaaataaatttgacatgggtgctacccaaagatgacagatctgagctatgtttagcctacttgcgtatgattgtggcagggactgaaaagtgggcgttgatccctttcatgatttattcatcagatagagaaaaggggaggcctgaggagctcatgggagctgggacagggcagaaggacctcagtccaaacacagtgcactcctattatcagtaccctctgttgaaggacagcctgcatcttgccctgtcatcatgacataatgctgttatttataggaacaggaaggaggcaatgcaggacgagagctaattccccaagttcgattaattgtcatcctcttttcctccggcctacacatacttctcttaattaccttaaggaccccccaaaaccaggactgccatttattcttagaagtacagaaagcattattgatctcttctgatgtgggggagatggatcggcacatctgccctcaaatccaatgaggtgagaccatattgtgtggtttaaagaaaacaaaaattcactgtcaggagaagataatagcaacccatattgtttgaataaaatgtgttttctgctttcttcaccccagctggacaagctggagagttggtttctgtccctgggctcctaagtgtgtctaggaggacaagcctctgttcgctgcatccactatggtcctagggtagaatcagtgcacactctctggatgccttgataacggtgttactacagccatcttgctgcatagcaacatcagtgctgaatcacaagctgattgttagagtatgcccttctgggtgccacttataccatacagctcttcttgttacatgcatgtatgcaggcatgcacacacgcacaatttaatttttattttatttttgtttttctttttttaattttcaatcgaaaattatattataccaaatttcccaaaaatttaactagaaaaattgtaaaaatttcaataatttcaacaaggtgttatgatacataattgacttacaaaatttaccagtcttaatacatatgaataacaagcatgctgagaaagagatcatagacaggctcctcttcccagtttcttaaataaaatgaaatatttagaatatacataacaaaggaggtaaaaacccctctaaaacgaaaactttaaatatgtgaaggaagagattaaggaacatactagaatttgaagacctcccaagtgtacagcttggtagaattaacactgtgaaaaaaaagaccttcctaccaaaataatttactgattcagtgaaatcataatcaacattctcatctcacttttcacataaatagaaagaaaatcctcaatttgatatgagacaacaaaagacagaatagccaattagtcctagataagtgtttgtttctatgcattctgctcactttaagtgcatctgtcatgacctctacttttatacatcagtttctattgagccaattttgttcgatattagaaaagctactccagcttgtttcttgggaccatttgcttggaaagttgttttctaaccttttactctgaggtagtgtctgtctttgtcactgaggtgtgtttcctgtatgcagcaaaatgttcggtcctgattacagatccagtctgttagtctaagtcttttaattgggaatttgagtccattgatgttaagagatattaaggagaagtgattgttactccctgttatttttgttgttagaggtggaattatgtttgtgtggctatcttcttttggttttgttgaaagattggtttcttgctttttctagggtgtagtttccctccttgtgttgatgttttccatctattatcctttgtagggctggatttgtggaaatatactgtgtaaattcgattttgtcatggaatatcttggtttttctgtctatggtaattgagagctttgccgggtatagtagcctggactggcatttgtgttctcttagggtctgtataacatctgcccaggatcttttagctttcatagcctctggtgagaagtctggtacaattctaataggcctgcctttatatgttacttgacctttttcccttactgcttttaatattctttctttgtttagtgcatttggtgttttgacgattatgtgatgggaggaatttcttttctggtccagtctatttggatttctgtaggcttattgtatgttcatgggcatctctttctctaggttagggacgttttattctataattttgttgaagatatttactggccctttaagttgggaatcttcactcttctgtacccattatccttaggtttgatcttctcattgtgccctggatttcctggatgttttaggttaggagatttttgccttttgcatttttttttgactgttgtgtcaatgttttctatggtatcttctgtacctgagattctctcttctatctcttgtattctgttggtgatgcttgcatctatgactcctgatctctttcctaggttttccaactccagggctgtctccctttgtgatttctttattgttttatttccatttttagatcttggatggttttgttcatttcctttgcctgtttgattatgttttcttgtaatcctttaagggattttgtgtttcttctttaagggcttctagctgttttacctgtgttctcctctatttctttaagggacttatttatgtccttcttgaagttctctatcatcatcatgagaagtgatttaatatctgaatcttgctttttcggtgtgttggggtatccagggctttctgtgttggaagaattggattctgatgatgccaagtaaccttggtttctgttgcttatgttcttatgtttgcctcctgacatctggttctcgctagtgctacctgccctcactatatctgactgaagcctgtccttcctgtgatcctggttgtgttagaactcagagttcatctatctgtgtgatcctgtgattctgtgatcttgagatcctgggtgtgtcagagctgctaggagtcatgctgcctctaggatcctgagatactggtgtgaccaagctcctgggatcctgggtgtgttagagtgcctgggagtggagcttcctctgggtgttttggaactggctgccttattttttgtttttcaacacagggtttcgctgtgagttcccattggctgtcctagaacttgctctatggaccaggatggagatctgtttgcccctgctttctaggagctgtgattaaaggtgtgtggcaccactgccccagcttcacatacctttatttttttattttattgttttgttttttcgagacagggtttctctgtatagctctggctgtcctggaactcactttgtagaccaggctgtcctggaactcagaaatccacctgcctctgcctcccaagtgctgggattaaaggtgtgcgccaccacgcccagctcacatacctttattttaagataacaaaataataaaattttaagattaaaaaatataacatcccagttatgattaatctctaatctattttacttaagttattttgtagcctattacctgcacacatgaagcttcatgcattttacatgtaaacctgatattcatgtaggttgacataatctttaggaataaccgacatgcagatagactattacagtttccttgtgttggtaacccattgtttctggttgcttggcagttattgctgggacattgaccattgttttccagtgctgcggtgacagcaagtgctgccacttaagtgacttagcatagtaggttctttccctctccctctctccctctcctccctctcccttctctcagtctctctctctttccttctttctttcaagtatctacaggtataactctagaggcattgttagaaccaacgagtagtaactgctatgtagttcttgttaaatgaagagaaattctatttaggcaacatgcaattgggtgtcccacactgtagtaatttgtacaattttatagagacagtttattctatggtagcaatgttctacccctccccactgtgcactcatatgcacgcacgtgtgtgtgtgtgtgtgtgtgtgtgtgtgtgtgtggccagggagtgcataggtatacagatgcatatggatccagaggttgatgttggctgtctcgattacttaccacatgttttgaaacagggtctctcactgaacctgcagctcaaagactgacctaggttggttggccagtgagcttccaggctcctctcatccttaccatcctagcgtttggttacaggtttggcttgtacacagttgctgctgattgtacacagttgctcaggtccttctggttatgtgacaagcactcaatagagtcagccaagtccccaagtcacttcttttctgcctcccttacaaccctagtgatgcaggccgaagtggtttgaagatagtacgtaaaggaatgtgtgtgttagaagacccagcattagcaagaaggcattgttcttctaattagtgtcaaaccctgagcagagtcccagtacagtcctcagaactgcagcttgaagactgggggtgtctctcaacagtgtgtgtgtgtgtgtgtgtgtgtgtgtgtgtgtgtgtgtgtgtgtgtgatgccctgggatccatcccctctaatgcacaaaacaacccagcaatgcctttttgcagaggcagacaagctgacctaaattcagggacccaaggtaactagaataatctggaaaaagaagatcaaagtttgaaggctttctgcagagtaatcaagatggtgtggcactgatgtaagagtcagcataaggatcaatgagaaagaagccccccccccctttatggttggttaacttttgacaagggctccaagaccaatcaatggccaaacaaaaaatgtcgtcagcaattggtgcaacaacaactaaacacactggtgaaagaatttcacttgacagctatttcatctcctacataaaattaactcacaaaggggcagctctaaatgtagaatctaaaatcacacaccttttggcataggcagtggtttatacagaacaccaaaaatatagagacaaaaaataggtgaattaaattacagcccagtgaaacactagtgtcataaacacagagggagcaaagtgacagcctagattaggaagaggactttataagttatatattcaaaggaggattatgtctggaaacagtattaaaactcagaataaaaggataaattacccagtttgaaattggcatccgcttactatggactcaccacctctccttggagtatacatacccaagagaggttagcaatgttggctggttttgtaagaccccctttcagggaccccctactctagtctcgggagagagagagagcacacccaaagaaacatgagaatccttcttgctgcaaacacatgagtcagtttaatggtggagctccgggtcaaaatgtatctcacgcaggagacagtggattcgaccccaaggctcgaaagctagggggttttatggggtaaagggcttaggtgtggggaattcagcatagtgacacactattggcttattcaaacatcaacagaaaaattacttgcaggtcagggtgtcagagttctgtgagttgttgactcagttcagatagccctgttttgtcttcacattcctctttatctttatggtcaagctgtttccaggaatgttttaactatggggcatgcccgggtttgtttttctttgttctcagccccaggcagcttctaggctcacaaacaaccagcaatttctgggtactttatatgacttacagatcttgaaatttcatctttctttcagtttcagtggcagagcctcttaaggtcacatggtctttggcataacctccatgatggcccacagatggcccatagtgaatacttgttgagatgcaaagggcagatgagcctgtgaaaagatacttggtgttgaaagtcatttaaaactgtccatccaatccaatgggaggtaggacttcacacccaactggcagtgtacagcaacactgcaagaaacagcaagaatcaaatgttggtgtggctgtggagaaaccagaatcctcattcattgctggtgggaatccaaagtgggacaactactctgaaagcgcctgaacatgtcttcagagtgctaaacttcagtttatacacagctcagcagttcttggtatatactcaagagaaatgaaaatatacattccatattatttattatctttagtagtaaaaaggtagcgtcgaggccagtgtctgtcagcagaaaagcatgtggcacatccatcgtagcctgcaatccggcactagaaaggaatgaagtctgcgggagtcagcacgtgctgcctgcggtccatgctggtcccagggaatgcatttagttataagacattgagggtgtgcggttactgatagtcaagaggaagatgaggaaactggtctacgttgagatggtggtgcctgtgcatctgtgagtttacaaaggtccttagccagacacctgatgacatcctcccacggtgccattgcgtccagggacctccttgaggtcactttcctgactatgcctgtctctgctcacatttggtcatctgtgtctctgttctctgtcttccttgctcatcttgaatcccagtcttccaagtgctacagcttagttcataaaccagtgtgttgctgttttttcatttcttggcattctcctgccaattatttttaattctttgatgtcatctttaacatgaacacattttttttttaattttctgctttttctccatcatgtcaaaaaaaagcattctggtgtagtagagaaagtgttgattgaggttgtctctacaaggtcttgtgggctgggagtgtagctcagtggacagtgcctgaccagaatgcacaaggtctgggttcaacacctagtattccttcactgtttggtcttgcctagatttttaaagtatttatcatcatcatcgctattattattgtgtgtatgtgagtgtgtgtgtacgtgtgtatgcacatacctgccataacatgtatgtgtggtcagactgtagacttggttctctccttctcttatcatacagggatcaaacttaggtcactgagctgccaacacaagtgcttttacctgctgagcctcttgcctggctcctggcctgcagttgtgatcccgtgtgttatctatgtaaagaggactgtacctgctacccagtggataccagtcttcagcaccgtcacacaggcaaacagaagcattgagtgtgtggtgttgcattcattagtgtccccattctacttgagttgagttgtgagtcccaggaaaaagcattctctgtcacacgtttcccaaatcctatgcttgattgttgagagacaagggtctcgtgtatgagttgccctctctggctccacttctgttagaggagggtttggtgacttcttttccaagaggctttatacttaacaggtagagacagaagaactgactgctcctgccgtttttcagacatgttcaagtacttagtatctctggtgtcagagacccgctgagggatgtcatgaaaaacagccctgtccgcgcaagaacaagatgaatgtgtgacagggcaagcctcctggaggctacagtactttcctaatgaccccactctgacccttagagtctgttcttaatatgtctgtctgtgtgacttacatgtaacatgtaaagtttaaaccgcatcataaaaaacaagattttgggccagaaataagctaagagacctcgctgctcagaggtctagattggtccccagaagccatgttggtggctgtagctccagcatttgcaaatctgctgccttcctccggtttctgcccacacttgcacgtatgcaccaaccatacataggcacacatatatatgtataccaagaaactaaagtcagagccagttatggtggttggcctcactgtgtaggccaaactggcctcgaactcagatgtccatctgactgtctcccaaaagctggagtcaaggtagccaccaccacacccagcttactacagtatttttaagtctattctgtaaaccagtagggcttattcacaaaagctcctcatagctcagcctcgagaggttaccccctggtgtttcctgtattaaagaaataattctaaaggcattttcaatgcaaggctacctaatgtggactttttcaaaggtaaagagagtattaacaaattgaaaataaaaaatccctttccctttttggtgaaaatgacatagatacaagccatttctgtcggcacatcctggtaatgccaaccatcatcaaagtccagaccaaggcaggcacgagccctaactgatatgctcatagcctgtgaagagtcttctcaaagagagtcattgtccagtggcttggttgtctcagtggaagagccaagagagaacaacgggaggtttggagaacttgaatttgaagaactagattgatggttgtcttagtcagggtttctattcctgcacaaacatcatgaccaagaagcaagttggggaggaaagggtttattcggcttacacttccatactgctgttcatcaccaaggaagtcaggactggaactcaagcaggtcaggaagcaggagctgatgcagaggccatggagggatgttctttactggcttgcctcccctggcttgctcagcctgctctcttatagaaccaagactaccagcccagagatggtcccacccacaaggggcctttcccccttgatcactaattgagaaaatgccttacagttggatctcatggaggcatttcctcaactgaagctcctttctctgtgataactccagctgtgtcaagttgacacaaaactggccagtacaattgaccccttgtcaacttgacacacaaaaacatcactagtaagcctcaacccttacaatcttattcatccccattctaaataactttaaaagtcccacagtctttacatattcttaaaatttcaatctctttaaaatatccatctcttttaaaatccaaagtctttttacaattaaaactctcttaactgtgggctacactaaaaaagtttcttccttcaagagggaaaatatcagggcacagtcacaatcaaaagcaaaagtcaatctccaaccgtccaatgtctgggatccaactcatgatcttctgggctcctccaagggcttgggtcacttctccagccaggccctttgtagcacatgcatcatcctctaggctccagatgcctgtactccactgctgctgctgctcttggtgatcatctcatggtactggcatctccaaaacactgcatgaccccttcagtcctgggccttcaattgcaactgaggctgcaccttcaccagtggccttccatggcctctcacagtgccaagcctcagctgctttgcgtgaccccttcatgccttcaaaaccagtaccacctgggtgacccttacatattaccaagtcctgctgcagcaagagtacaaccttggccatctctggaacacagcctctttgtgctttcagaaaacacttcccagaagatgtcacctcaatgatgctggtctcttcttaatcaccgctaatttcttagctccagctaaccagcatcaatagtaccagtaatacaaagtttttgctttggtagttctggtatcttgttaatcacagctgattcttcagccccagctaaccagaactacagaatcttcacattcaaaacagcaatggccctgaaaagagtctttaattttccctctgaaatttcacaaaccagacctccatcttctgcactgttctcaacattatcttccaagctcctacacaacatccgacagagctcttaacaacggatggatctttaagcccaaagttccaaagtccttccacagtcctccccaaaacatggtcaggttgtcacaggaataccccactcctggtaccaatttgtcttagtcagggtttctattcctgcacaaacatcatgaccaagaagcaagttggggaggaaagggtttattcagcttacacttccatactgctgttcatcaccaaggaagtcaggactggaactcaagcaggtcaggaagcaggagctgatgcagaggccatggagggatgttctttactggcttgcctcccctggcttgctcagcctgctctcttatagaaccaagactaccagcccagagatggtcccacccacaaggggcctttcccccttgatcactaattgagaaaatgccttacagttggatctcatggaggcatttcctcaactgaagctcctttctctgtgataactccagctgtgtcaagttgacacaaaactggccagtacaatggtcgatcccctgcctgctgtattcaaaactctccctcccacttctcccggagcataacagtggcaggtgtaagctaaagctcttggagtccagagcactttgcggacctgctgagaaatgcccagggacacagtgccaggaagaaggcagaggctggaataaccggaagagtgtgttcgcaggcactcagagcacagtgactgcccagcacagtgctgcttggtaatggctctgccctgcacagtgctgcttggtaatggctctgccctgcacagtgctgcttggtaatggccctgccccacttactgtttatggctgccttggagaacaggtttagcagtcagtgctttcatttgtttccttctccttgttggtttgtttttctgtctattagtgaaggccgccgatatttgtttcagggttgttgttgttgtaataagatatggatccaggctggcctggaactagcggtataactgattgaccttgagcttcggggattctcctgtctctcccttctgagtgcaagcattgtagatgtgcactaccaaagctgccttatggcgttctggggggtgggaccctggccttcatgcatggcaagcagacaccaccaattaggataatggccttcaaacagttttgcctcacaatttgttagtgtataatttgcctgacaaaagccagtattgagctggagagatggtttagtggttaaaagggcttactgttcttgcagaggtcctgggtttcgttcctagcacccacatggtggctcataacggtgtataactcaggattccgaggatctgacatcttttcagcctgtggggccactgcacagacacatttaggcagaattctcaccttactatatgagtattctgcctaaatgtggtgtacggatacatttaggcagagcactcgtacagtaaggtgagaatcaggaaatctgtaataaaaacagggggttctgatcttactcagagcactgtggctcccacgttagccttctctgtgtgtattcttcaggcccaattatgaatgctacagtttattttaaaattcagctgtgagtcttgtctccagttgagaataattttccatcctctgtgccatggtaggtgttttaattcaccataaaacccaccatagattattttcttgttttaaattattttggtgaaaaagaggggtaatatatttctgctatttagcaaatccctcaaggaatgattaaggttgaacttgggctaatttagaggtcgcactggctcttggggccatacctttaagcatacacaccccgtaggatcttcaagtggtttctcgcatgagaaggagagatcacattcttcacacaggtaacttttacaggtgagtggcctttgtttccccagtgtgtatgacagtctgcaggccagatatctcaaagccctttcactgagtgtggagatccaggttgacatggcagtagtcattttgttcttagctgttgtcttgtgcactgggtaatacaggcaggcattctaaaccccataggagaaataaccagagcattacctaacgggttcttgttgtgctacaagttggttttgttttttgttttgttttgttttgttttgttttgttttgtttaaggctgtgtctattcaggttgacagcaggtcacccttgtctagcttagctcatgaaaccattctcctgcctccttggctgccagctcttgccccaaggactggaaagccaccttctccatagtgctgaatttattcacctgtcttcagtttgaagcatcttctacattgtatgctcccctccacactgcgctaactgaaacaaggcatctacagggtctctctccctctgaggttctagaaacaatcggttccttgactctgctgcatgcagtggttaacagcattcctgggcttgtggtcacatagttctgatttttgcctgtggccacccctcctaaaggtgcaggcgataatctccctgctcttgggcttaacctgtgtcactgtcactcaagaaagctcactttgcagttaatcagatcggaaattaaatactggttacttgactaagttgtttgaaaatacaccgatgtgtgcccatctcggagaggcttggggaacatcaagagctacagtgtggtgccagtgctatttcttggcttccatcttcctttcttgatgtcagagtcttatttcagtcatgctatcaaggtctagacccaattgctgcctgggtgcctttctgtcctctggaggcactgaacatgcagctggagacagcttagttgcagtggcccactcagaaatatcctgtgtgtgaatgctgagtccacaatgctgtggttcctgtgcaaaagaaatatgctgtagggagtgaggaggggacgctggggaagaactgttgatcccaagggaatagctgggtacaggcataataagcgtgtgagggtctgcactcacttgcactctcacctgcacactcacttgcactctcaccttcacactcacttgcacactcacttgcactctcaccttcacactcacttgcacactcacttgcactctcaccttcgcactcacttgcactctcacctgcacactcacctgcacactcacctgcacactcacctgcacactcacctgcacacatgcctcatgaaagtttttgtcacagagttggtgtcttacgtgtggtatgattcccccatgggagctttgtcacattgtcttaaggtccccatccgcacagggtacataatttaagcacaagaggaatgcctaagtgaaaagtctctttgtggcttcctcccagtgttcactgaggggttgaaggacacagcttgagtccttctgacaacaaaatggtgtgtcacgtgagggcagttatctgtcaggtgaatatttgtgaacgaaccattgagcccacagacttcctgagtcacaggctgtcctgcagatcacccctggctcatcctagcctcagtgacccctagggcttctgggcttctgcagacctcttctaggaccctccccatcgtccctgcctagctgccatgtagggaatagagttgggaggcaggagacacagcaaacagcaggcacagaagagaagggctggataagaaggcacagccttgccactgtaggggggagggggtagtggatggggtgccttagtcccgcagagcaaggaaggactgtgcaggggtgccacccacagagcaggctgtgtgctctccccggtactgaaaggctcttgatgcctatttaatgagtctggaccttttctgactctttgatgctttttgaaagttcttatcaagttcttatagcctgaagttagcaaacatagaaagaaatttttaatggaaagaaaaatcagatgtccagtggttccctctatacctgggcatatgttccaagaccctctgtgaccactgacaccagagaaagctgaatgctagatctacatttttcctctgcatacttactcaggccataatttaatgtacacattaggcaaagaacaaaagtaaaccagaaaagagtcagccatgctctgttgtgaaaatggcagtaatgtggcactgctgaacccaaatagctctattcgtcccagcggtggctgcagtactccttgcactaacattctgggttctcgaatgaaagacacacacacacactttatattttaatatgccttaaacagctcaatggctgggccacttcagacctccacatggctgccatactccccccgcccctcatattcctgagttatttcttactaaaagctatattccatcttggctgtcccggacccagacctgcagctcccttggtctgagttccccagcacctacatgacgactgtgttctctgcccagcacacctcaggcaaggcctctgctcctttccccagcatggcggctctccttttcctgctctttctcagtcccttgtccaggagtcctaaagtcccacctctgtctccctgcccagcccttggccactggcaactttatttaccaatcaaaaccaaccagcatcttccatgagaatgtgcagattctcatgcaattttggggaccagattaacataatacatgcagcattagaccaaacccacaacaatgcggtctcttgtacctctcaaagtatcttcctatactgtattctggttttagacagcagttgaccacaggccactgggaccacagaaagtggaacagcagatttggggaggggagtgataggttatctctcgagctgctcctgggtaggcaagttcactggccccaaggaaggaagccaggagcaagttgtcatgagggtaagggtagaaagagagaaagggcaggagagctgagaagagaaggaagaagagagagggagggagggagggagggagggagggagggagggagggagggagggagggaggggagaaagagagagagagagagagagagagaaagagaaagagaaagagagagagaatatgaatttgagcaagcacgaacaagtgtctggattatgtagggaagaacctctggggcaagggcagcccagcctctggactggaaaattcaaggttgggagcagggtgtggcagttaaggactgcggctgatgagagaactggtggccagatcttctttgatatataaaatattcacttccatcccttgtcctgggtccagaataaagcagggagagctctacacgcagaaatgagtaaaactggcatctgggggtggtaggttctgcaccgtagcgggcagatgtgcgcattgcagatggagtctggagcctcagagagttctgagtgttgagatgagaccaaatgaccagaagcaaatgaatgccagtgttcagttaaaatccagccatccattgtccagttgaacagagggaccagatagggcaaggcttactggtagtggctttgatggttattctttttgaccacaactaaatattcaccagaagacagaatatggtcctgtgcctattgaatgtgcttggttacaaagagctagattggtggacagttataatacagcgaagtctatatagatgcatgtagagagactagtatggggaaagatggggtgagctgggcccttattggaaacgtcactgtctaagccgggctttgagatgtatacctgcagtctcagctacttgggaaggacagctggagtcaggatcatgggattgaagccaatatggaccacacagtgggactgccttagttaggttttctattgctgtgaagagacaccatgactgtggctactcttataaaataaaacatttgattggggctggcttacagttgagagtcctttgtcatcatggcaggaagcatgatggaatgcaggcagacatggtgctggacccacaggcagcaggcagagacagccactgggcctggcttgagcttctgaaacctcaaagcccaccccctagcgtcacactttctccaacaaggccacacctccaataatgccactctctgtgagtctaagggggtcattttcattcaaaccaccacagggaccctgtatcacaaaacaaaaaaaaagaaagaaaagaaagagagactgatgggctgcctggaggactaaggcacttgcacccaagcctgcaaacctgagttcaatccctagggacctcatggtgggaggtgaaaagcaacttccaagattgtcctgacctccacaagtgtgctggctgtgtcatgtatgtgcacacacataaaataagtagaaaccagtttttaaaaaggagttaatgtgctaaggttaatctcgcatcaagcaaagtggcatgttttgttagcagcccttgaacacctttcctgtatggcttgctgggtctgttgaaaatcagggctcaggaaaaagctggttgtgatttatgatgctgatgccaggtcatagccagtcaccctgcttttctttttctctttagtgtcaaatcaacagtgccttgacttccttccacactgctctggagctggctgtggaccagagggagatccagcacgtctgtctgtatgaaattggtaactatgagaatcgcgcatgtctgtctgtgtgaaatcagtaactataggaatctagcctgtctgtctgtgtgaagtcggtaaccaggaaaattgagcatgtctgtctgtgtgaagtcggtaaccaggagagtccagcatgtctgtctgtgtgaagtcggtaactaggagagtccagcatgtctgtctgtgtgaaatctgtaactataggaatccagcctgtctgtctgtgtgaagtcggtaaccaggaaaattgagcatgtctgtctgtgtgaagtcagtaactaggagaacccagcatgtctgtctgtgtgaagtcggtaactaggagaacccagcatgtctgtctgtgtgaagtcggtaactaggagaacccagcatgtctgtctgtgtgaagtcagtaactaggagaacccagcatgtctgtctgtgtgaagtcggtaactaggagagtccagcatgtctgtctgtgtgaagtcggtaactaggagaacccagcatgtctgtctgggtgaagtcggtaactagaagagtccagcctgtctgtctgtgggaaatctgtaaccaggagaacccagcatgtctgtctgggtgaagtcagtaactaggagagtccagcatgtctgtctgggtgaagtcagtaatctgccgtctcttgtgcttaagcgggtgttgtagaaaattttaattctgacccagagtttctaccctgcttttgaccctttggttcctagatacacagcctgtatatttacagtaagccttaaacagcacaagagctgggcagcagcttcccatccatggtgttagaatctactttcctatcgataaccctgagttaacttactacttgctgtgtttcatctgggcagctcctaactccagttggccacctaacccatggcagcttctccttcctcctcctgcactttcttctcctcatggtcctccttcaaccccaaacctgtgaaacctaaaccccatctgtctcttctgcctggctattggctgttggcatctttatttcccaatcagaagtaacttgggggcagggtcacttagctatgtgcaaggagtcttcagggcccgatattagcattagaatacaagcacctctggcagtctgttaccagggggcatcttctctgctgccctccttgtcctctgggaagacactgctctgtatactgaggatccagtcactctagcacatgcactaaggcttgtctctcgggactcgcttttcctcgctaccaattttgatttggggacaacagacagtatggggtggattactctagtacatgttaaaattcaaggctcaaggctctcgaaaagtagtgcctaggaggaagctggagcctaggtcttccagtctgtttccagaccttctgagccactgatggccagtggagggactgtgtgttctacttagactttttttcttttttgtcaacttgccccaagccaccaccgtgatctgggaagaagggacataaatagatgccttcatccgattggctgtgggcaagtctgtggtggcattttcttggttaatgattgatgtaggtaggtctggcccattgtaggcaagccaataagagtgttcctccatggcctctattccagttcctgtctacaggttcctgccctggttatcctcagtggtggactatgatggggatctataaaccaaataaatactttcctccccaagttttgagatcgtacatgtagaccacacctaaaaatacacaacatcaacacacagaccctgaagaacaggccccagccttccagccattcctattacagcacagttagagactgtgggtttggggtttcaaaagctcacctgtgtgtaaaaacagggagagacttggtacttaagaatggtgcccagacagaacttagcatatctgttcttccaggaagaccagggtacaccatccctaagtcacgtgcttttctggtaacataatcctcatataattttaaccaagttgttttggtcattgttgtgtcccaggaacagaaggcaaactaaggcacagtgccagcaggtcacatctaggtgggaccaggtcgttggcaagtagaaggtccttcttggtcagctttgtgtcttacagggacatggacacaggagagtgtctgcctaagatcccctccgtctcccaggttgttatgagagcttctctggctgcctgcctatgctctgctctgaccctggcacttgagagatttcagaatcctttatgtaaccacccctccatttgctgggaagagcaaatacaactttgggcttggaatataaacagaatgctggactttggcccagtgtgtcggagatgagaaatgaagagtagacaaaggagaaaggatgatgggttggtgggacccagtgagagttgtgttcacagcactccacaggtgacagggaagagaagcagaggacacctgtcacctgtcagacagtccctcgctccctatcactcgcctcacctcctgcagacacacatgtttaaggaaagcacaagggaaaagatggggaatcacccagcaagcgatggccgctgtgtgtgatacctgttacggctcagtgagaggatagtgtataactgaacagagaaatgtgtttctgtatatattctaaatgctgctggggggggggggcggagctgtgtggtggctgtgctgttgagcaaggtttcaaaggactggaatttcagagcctaggttggacagtgttttctactctgccacttcaaggtgagtggacagaacaaactaggagcccataggcctaggattcaatgattgaagaaagcacacagagtcaggagttaagtgtgtccatgattgaggaggcagactctcgggtaaggcgacctggccactgccttgattagcagttaccatctgcttctgttttcaaatgaattcaagtcttgcactgatgtctcttacacagttagtatgttaccccacagtctcagcctaaaatgtgtcaaggctgtgtcttgtagaatcagactgtctctttcctgagggcatacccccacctctactagttcaggtgacaagtctgaggtgacacaacttcttagtgacatgcctgacaatgttcttttgtccatgtggtggggtggtgtttgttatccgtctgtctgttctggtttctgaccctgcaatctgcctcagcctcaaaggtcctgcgattccaagcctggctcataagtctccttttatagaggcagtattctatggaagaaagagtgatggacccccaccacagttgctcctgctgtggacgtgaggaagtcctcaccctgttgatttcccctttctagcactagggtatggggaggctaggtgtgaggaccagcaagtgctccagcacgggctgccatgcgtgcacacactggggctcaagtgactaggaacaagcctctgcagcctacagaatacaggcgggttggggtggagggatgggtctgtctgtcctctcacaccatacagagcacatgatgatggtttctcactcctgtgagtgctgttcagaggcaggtgcaagtgtctagtcagaccaagtcgtgtctacactgccctcctgcccctgctgtccctgctgtccctcctgcccctgctgtccctcctgcccctgctgcccctcctgcccctcctgcccctgctgcccctcctgcccctgctgtccctgctgtccctcctgcccctgctgtccctcctgcccctgctgcccctcctgcccctcctgcccctgctgcccctcctgcccctgctgtccctgctgtccctcctgcccctgctgtccctgctgcccctgctgcccctgctgtccctcctgcccctgttgcccctgctgcccctgctgcccctgctgccctcctgcccctgctgtccctcctgcccctcctgcccctgctgtccctcctgcccctgttgcccctgctgcccctgctgtccctgctgtccctcctgcccctgttgcccctgctgcccctgctgtccctgctgtccctcctgcccctgctgtccctgctgcccttgccgtccctcctgcccctgttgcccctcctgttcctcctgtccctcctgcccctgctgtccctcctgcccctcctgcccctcctgtccctcctgcccctcctgtccctcctccccctgctgcccctcctgtccctgctttcccttctgtccttgctgcccctcctgcctctcctgcccctgctgtccctcctgtccctcctgtccctcctgcccctcctgcccctgctgtctctcctgcccctgctgtccctcctgcccctcctgtccctcctgtccctcctgcccctgctgcccctcctgtccctcctgcccctcctgtctctgctgtctctcctgtccctgctatctctcctgcccctcctgtctctgcttcacctatactgctcttacagggtcaggaagtgaattggttgtctctctagaaatcacatcttcctttcattgttctccatgggttgtctttgagtcaacactgaaagtatttacagggaacagtaattccttcaaaagtgcttaccgcctcagagctggtatactgaactcagtaccttagggcagatgtactgagctcactaccttatagctggtgtactgagcttcgtacagtacacctgctcagtacagggcagccttactgagctcaccaccttagggcaagtgtactgagctcactaccttagggcaagtgtactaatctcagtaccttagggcaggctttctgagctctctgccctactgtgttgggcgtgccctgtgctttggctttagagcggtgtagcaagctcgcagtcccgggtagcacactgaatgtgctccttttgtaggctggtgcagcatgattgaactcaacttcaaggatgcatttgattccttcgagaggctgaagaacgagtcccggtggtcccagtgctactacgcatatctgactgcaggtgagtgactgtcctgagtgtggccagtcagccccacatcctggcaggtgagtgactgtcctgagtgtggccagtcagtccacatcctggcaggtgagtgactgtcctgagtgtggccagtcagccccacatcctggcaagtgagtgactgtcctgtgtgtggccagtcagtccacatcccagcaggtggggacagacgaggaggaggcagagaccccacttttgagttcctcccctcctcagtgttggatgcagctcatcaggtgagcagagtaggttcttcccctgcttagagaatttaaaggggagaccttggggagaccctgtctagccaccataggatgcctgggaaatctggatccttcctggggttcttcctgtcatcagtaaaaggactgaaggatagagtcagatgaaaagagatcccaagggtagatagctgcagttctgctagctgctcaggaagagggtggaggagggaagagaaaggccatgctgcttgagagctgttgacacaaagagggaggggctcaggccacttgcaggaaggggagcttcagagtacaattaggaggccagcggtgccagagtttaaaaagcctctctccagcatctgacagagactggcccagaaggagaagtcagtgcctttttgagttgagaccctgctgagccttacctcttggtggctagtagggactagacaagtgggattctgggaaagaaaagtacattatctcaaggtgctctcgccttcctaggggtggtccctcagccaggccttaacctttaccactggggtaactcgtaagtgggcatgtctccacctacaggcgagtcctgttctttgctataaccaagtaaatgaggcagaaatgcccagaggcccagctggatgccatgaccagccaccacacactccatctagtctgggcctgtttggtccttagggatgcttcctcgtgaggctgtattcactcccagcagtccctacaccactccctctctttctttctctttgtggtgtttttaacaattttctttttgattgatttactttacatgggtgaatgctgtttctatgcataccagaagaaggaatcatattctattacaagtggttgtgagccatctgtggttgctgggaattgaaattgggacctgtggaagagcattagccaatactcttaacctctgaggcaacattccaggcctctggtgttcttatttattagagtttttaagtgttctccagaactggccgtgtcgttttcatgatgtgaaagtctttagtttctgctgtgttcagagagttagcaggatttgctacaatcccattttgccaagtcatctgagagctcaccttaccagagctccgggtacccctgtgctgcacagcgaaaccatgttgggggtgcaagggtcgggtggggagtagggatggctgcttttgcttttaaaagctcttagatgacatagcttatgttgggctgccacctggtggacaaaggtgttatttgtctctgtgagccaaaaaatgtctccgaggttttgaggacatttatagattataattatagattataattacaattatagattatagaggtgcagaactgaagagacgggaaggtggagttgtggtctcctgccttcaagcgacctgtaaagttttgctctgtgtaagcaatgtcaaaaatggttctcttacctaaacctcaagagaaacatgagcacttacttgtcctagtgctgggaatcaaagccaggagctcactgtgtcttcccctgaactacattcagggaccactgagcactgcagatgttctcatgcacacccatttcttcctttgaacgtttggcttcagtgggacatggtctccattcagttccattcccttaattcatctaagacaggatccgcatcagccaggctgtgtcctgggcatctgaaatcacactggagagcagttagtgtgcatgcctcgtgtctgtgtgcttatacaatctctgcagggcgtccctttctcatgcggtgcttattatttctgatatgtgggttggtatgttatgtctcacacttagacagttagccagcatcttggataaaaataagagcgtctttctggtaggtattggcatgcccaacacttagagaagtaagtggtccccaactgcatagcctggagggatggctataaggaagctagtggctgggaggagttgccggttcttgcaggcagtgtgggcagctgttctctagtgtcatttttcttgggaatacaaaaaatgagcatgtgagattgctggttggccaaacacttgcttcccaggtatttggaaatgtctgagcacactaggtgtaattgtgtagggtcctcatttctgtgtctacagggccgttggaggggccggttgcaagcacatgaggaaaggagtgcttggtgagggaggtgccttgcagggttgtgtttgagttagccgtgaaggaaactgaactgacagaacgggacaggtgtccagcaccttgcctctggttcccctctaccgttctctcgagatggaacacacaacaccgaccctgctcttctcagcagttctcactgtaccgcgctgcctggctgccaccaccactcatcccacagcttccagatggttccccatcggaagtctaaacactaacactgcctcctcctccacccctgcacgcattctgctcccaagttcaactgccctgcagctcatatgagcccaaagactggtccatactgtggcctgtcccagcatcgtcttcattcctcaggctgagtcaactccacgccttccgtgcatggcctgtgcctgagctcgtgtccccgctcatccgccagtggacgtttagatgggtttgagaagactgaacacacagaaacccgggcccttgcttttggcttcctgagaatatctgaaaacagaatcgctggatcttagcctctgattgcagtgtttcagaaatgttgaaattatatgaggattatgtcaccagaaaagcacgtgacttagggatggtgtaccctggtcttcctggaagaacagtatgctgagttctgtctgggcaccattcttaagtaccaagtctccctgttttcacacacgggtgagcttttgaaaccccaaacccacagtctctaactgtgctgtaataggaatggctggaaggctggggcctgttcttcagggtctgtgtgttgatgctgtgtatttttaggtgtggttctcatcagcttgtcttggtcactgttctgttgctgtgaagagacaccatgatcatagcaactcttctaaaagaaagcattaaactaaggggctcgcctacggcttcagaggcccttgtggtgggaagcctggcagcagcaggcatgcatgtaccgagaagtagctgagagctgtacattgtacccaggggcagcaggcggcggggctgggcggggagagctgtgagaggagagggtgggccacaggcttgggtcagctggatggtgccatcttttggacataacttgtttgtagaaatgcaattctgatgtcttgcagtttgtcagggagccactggtgatgtggatggggcacaacttgttcttaaagaagtccagaagctgttcaaaaggaaaaacaaccagattgaacagttttctgtgaagaaggtatgtatgtcagagcttatcagccatgcgcaaggcatctgatggccgggcagaactagcaccaaccacccccccccccaatctcagtgtctcccctgtggccttgcacctggctacagcagggttgattttggtttggaatgagttatcctggaccctgacagctaatgagcctgcctggaaggaggaagtgcacttctgtctgaagtgcaggtcactttagaagaagttggcaggagccctgagaggcagatggccttgcttcccatgatgatgacaatgtcacattctgatgtaataaagaccaaacgtggtgttgcgtgtatcagtggaaatctcaggactatgggggcggggataccagttttgttgcctatgtctgacactaagatacagccaagtgaccctgagtgacctcaggtgacactgagtgacctgagtgatggtctcccttctcatagctttgtttttccttcatttttcttttgttttataaattttcttttactttaaaaggttttaaaagttcaattagcttttattagattaaatttattccaacataaactagatgatagaggctgcaggaacagggttctcagcacccctgtcaacctggcacaacggcctatagctcctgctccagagagtacagtgtcatcctctggctgcaacaggaaccttcaagtctacccaagtggatacatgctcattctccccgttcccccaccccttacacacacacacacacacacacacacacacacacacacacaggtaaaataaatctttaacataaatagattacaaagctgggattatgacttgatactgggacatttgcccagcgtatgaaaggccctgagtttggttctcctgtaccaaaagatgagtaaatgcataagtaagattatattgtactatagagtgcatctgggagccccagggctcaggacatgatggagatgtgtgctctgagtcagcggccagcttgcggagcttcatgggttcgagccaagagtgcatcgttttcagctgcacattctcagaacccaggcacccaagacttggctgaataacgaatatgagctacaaccataaatatacttaaaaaataaagttgcaggccgtttgtagtgtggagaagctttgtaagggagggctgttcacattgaccttgcactgtgacttgtccccaaagtgcagcttgtcatccgggtttgctttgaagatcagggcctaatattctgggaatcccttgcaggctgagcgatttcggaagcaaaccccaaccagagcgctgtgtgtgctggcctccattgaagtgctctacttgtggaaagcccttccaaactgctccttccccaacctgcagaggatgagtcaaggtaagcacgcacatgctgtcacacagcccgccagggcggctgcccccagtcccgcatgccagctgcctccgagaacacacacctctcatgctgtggtagactgcgtgccatcagcgacgagtcgggtgcattggcataggcttcgagaccgggctgagctacacgagacccaccgacttgctagacctggcaccattttcctgcttttgtcttttgagaggggtctcgtgtagctcagcctgttcttgtgagcagtcaggagtatttccatgcctgtctatagtgaggaagcaggctcctcagaagtgacgtgtcccctgaccctaggagcaccatgggtctgagaagcagatggcactgagaatcttccatgcagccatgtctgtctgggagtttgcaaaggcttacattacacagttgccagtacaacaacaagagaaaagctgggcatgaacccataacccaactcctaagaccacagaattaaggccagctctcgctatacagagagaccctggagaggtttacagtaggcaagccccagaaatcgatggtaactactgcagcaagttcttgagatttcacgcagccacacctccacacctgaccaaatatgagataagactttattgtaagtgttctctctctctctctctctctctctctctccctccctccctccctccctccctctttcactctctcatgtttgtacacatgtgtgcatatgtgcttagaggctaggagatgcccttggctgttacgcctgtcttcatccctaggtgctggggtttccagcacctgccaccatgtcttgcctctttaatgtgggttctgggggtcaaacaatgggctcttgccctttaactaaatgacctctcttcccaagtcaacttttgtttatttctttaaaacaaaccaacaatcacctctactctgaatgctcagatgtggtgtttgaagtcttcctcagtgactggtgcagcacagtatgtagccacaaccagagtgtctgctgcaaggctttggagctggtataatgtaggcttttatattaatagaatctttgagaagaattggtcacaaagtctaaaacactgctgtatacacacacgcgtgcatgagcgtgcacacacccccactctgaccccctcacacatcccgtaacactatgatgcagttgttggcacagctgaagtatacggcgcaggtaccaaagcctcagtgcagggagtgtggggcgcggggcgcagggtgcggggtgtggggcgtgggctctcgctgcacatcctggtgtttgaccaagtgtctaatggcacaggctctcacatagtaccttacagaggagttccttcacagccctaagcatccctccccacctccctcgtccttctctcttgaactctggtaactactgacacttccctgtctgcacgaggtgggaagtctgtgctctgtcagattagcttccttctctagtgcaagatggagcctggggttctttaagggttgacagttttgctgaggagacaactcagtcgcaggagtgttccctgtgcaggcatgagggtgggcattcacttcattagtggtgcttgctcgctctctgcagtgctggggactctgagaccctgtcttagaaaacaaggagagcagtgactgcagagtgatgctgaagattcatctctggcctccacacacgtgcatcctcacacacatgctcccatacacacgtgcacccgcacacacgtacacccgcacacacgtgctcccatacacacgtgcatctggacacacatgcacccgcacacacatgcatctggacacacgtgctcccgcacacacatgctcccatacacacgtgcatctggacacaggtgctcctgcacacatgtgctcccggacacacgtgctcccatacacacttgcatctggacacacatgcacccgcacacacgtgcatctggacacacgtgctcccacacacacgtgctcctgcacacatgtgctcctgtacacacgtgctcccgcacacatgtacacccgcacacacgtgcacctgcacacacgtgctcccatacacacatgcatctggacacaggtgctcctgcacacatgtgctcccggacacacgtgctcccatacacacttgcatctggacacacatgcacccgcacacacgtgcatctggacacacgtgctcccgcacacacgtgctcctgcacacatgtgctcctgtacacacgtgctcccgcacacatgtacacccgcacacacgtgcacccgcacacacgtgctcccatacacacgtgcatctggacacacgtgctcccgcacacacatgctcccgcacacatgtgctcccgtacacacgtactcccatacacacatgcatctggacacacatgcacccacacacacgtgctcctgcacacatgtgctcctgtacacacgtgctcccgcacacatgtacacccgcacacacatgctcccatacacacgtgcatctggacacacatgcacccacacgcacgtgctcccgcacacacgtgctcccatacacacgtgctcccgcacacacgtgctcccgcacacacgtgctcccatacacacgtgcatctggacacaagtgctcccgcgcacacacacacagaaacacacagagaaaggttggtacgttttgcctttctttgattaaggagagtcactagcagctgagcaaggtcagctttggatttgggggacagaagtatgaactgaacagagatactgctgctgaccttggtgacactgggttctaagtgggtgtcgtctttcctttcacaccccttctcttcaagcttgccatgaagtggacgattcatctgtcgttggattaaagcatttgctccttggtgccatacacaaatgtctaggaaactcacaagatgctcttcaggtaagctcgctgccatggctctatggtaagagcaactggctcctggcacctgagcttgtggacgaggagaagagggaggagcagtaggaggagaagcccctccctgtgaggactccgtgcatcttacacggtgaatgactttttccaagaggcaggaggacatggtggttcatgggatgttgctagcgtgactccggagccttagaaggctcctctctgtgaggactgctctttatcaaggacggcggagtctgctagagagaggaggaaatgagcacgctggctgtttgtgggagcattgagccctcaccatcagggacggaagtgtggggtgatggacgagttagggtagcttgtatttgctgagttcactttcttctctatgacaacggatggaggagaggctgaaagttgttgccctgggccttcaagttagggagccatcccaccttgtgggagagcatcattttttgtctggctcagtttcagatgatgaggggaagacatggcagagttccctcaggaagcagagaataaactaggaacaggatattccctcgaccgtaagccccagccactgacttcctgtgagcagcttcacctcctcaagtcccactgggctgtgaattcatcagctgatggatccattcacagagcatcctggtggtccaggccctcctcactagtgccgagctgggaccaggccttcagcaatgagcccttggggctaattttataaacaagcagccagtgtgtgtgggagagagcatcaggttttcccactactgtggagggaggattttttttttttttttttggttgcttggttgcttggtttctttgattttgtttttgtctgttttttgttttgttgttgtttttaactaaggttttgttcactgtcgttttggtgctaggaattgaagtcagggcctgactgatgttaggaatgctttgaccactgagctacatacctccaggccagctagttacaacaacaacaacaacaacaaacccagctaccaaaaaccctaaaataggtcatattacattacctaccttttgaaatagtttcatgttatgctataggagacttgggtctttaaatcatagactattaataatactcatattgaatttgaaattaatcttgaatgtgaattatcttagttgttatgtgactctaagtagctcttgtagattacatactcgggtagtgggaagatgcatgttaagaggtggacttggcctgtgtaatgttttgcatcttaaaatgatttctacttctctagcagatagtttcctcagtccaatagatgttggcatgttggaacaagttaggttgccagcacatttgtgttttagggaaatctccccagcagctgtggaaggcttctaagctgcagatgagaatgcagagacaggcaggaatttacaccgtttacaggcagggatgtaactgggaatagtcacattgaaagaattaagtcactctcagatgggcatcaggttttctcttgcccgtgggtcctagttcatttgtgttcagatgacatgacacagaaataaactcatctagggtggagggggatccttgggaactgatgggaggaagtggaagggctggggcatgggggaatgtgttcaaagtacatcctgtacttacatggccatggccttatgaacccagcacaaggaaacacgtgggaaggaataaagaataaggaataaaatagagttgatctagaaaaagaacagtcctcccgagggctgtgatgagcctcacaccaaggcagagatgacctcttccaagtaacgttctgtgactcagttcttccagcgagctgctagagatgagctatgtcggcagagtaactcgtacgtcccgccatatgcgtgctatgagcttggctgtctcctactggacagcgcagaggtaagagtccgtctcgtgggtcggtagtcttcagcagtggagtgtacgaagggcagcacgaaacacctttaacctaaacagagtctcttggtccttctgcttgtctcctgggtgagtccaggatgctgacacctctctttaaagaggcaacagttggtcatgttgaaatcttaattgcagatgctcctttccatacaaagcttcctaggtggggaaaacttatcttttcagaacagggagctgggctgtgatgatgtgctgtgcattcctggattttaatgtgagccactggcaagttaccagacctacttcctagtctacacaatgggataaaacagatttaatgggaatcgtagtgaggagtggttcctttaaaattattacaacaccacacgtgtaatttgctagctcctgtatatctttatggtgctgggggctggcaggtagtggacaacttgcctcccaaatgggaggactggcgttggaatccctagagtcatgcaaacaccagatgtggcagcacgtgtctacaactgcagtgccaagagaggggaggcagaggccagaggctccaagtcaaaggccaccgagaaaaactgtctcaaagagtggttggacagacacctgaggacaccccagggtatcctctgacctctacatgctgtacaaagaatcccctcaaatgtgtgtgtgcgcgcgcgcgcacacacacacacacacacacacacacacacacacacgtacacagagatgtgtaaattagcacaatgggcagggaaatttctttagttataatcaggtttcattagggcctgaaaacgactcaaattctcttaagaaagaaatgtaactatcacacatttggattggaacttgaagctttacattatttatcgtaagggaatgtttattcctcgggtagtgtgtcttccactgatagacatacagactttgctagtaagacagtgtgttgttcttatgttcacagactgtgggaagaggcagaactctacttcttcaggcaaaggtaaacccccccccccaaacccactgccttctcatgactgccctcaccctactcactgtatacctggggctgaattcgggaacatttgcaagtgttgttccacgtgtttagaattctggagaggcggtggctcagcaagttagtgaatataaggttttgaaatggcatctccaggatgtgcagtgcatgcatgcctggtaccctcaaaggccagaagaaagtgtcagatgcctggaactgtagttaaggatggcggtaaggtactttatgggtgctgggaatcaaagctaggtcctctggaagagaaaccaatgtttctaactgccgagccgtctctccagcccctcctatggttttaaagaattttccaacagtagcttgctttgagctcaatttaagactagtatttcaagaataacatgagggacttttccaaagagaatttgtaatccaaccttatcctcttacgaggtggaattacagtttttaaacaccctgcctaagtgttggggaggaagaaatcacctggatgtgaagcccctataggaggtagggaattagtctatgggtataaaatgtagtgtgtgtgatcctgtggtaccctggggacaagtttagctaacagtctacaatcatctttatctggtcctttcaggaggatttttctggctacgactttgaaaacagattgcacgtccgcatccacgctgctctggcctccctaagggaacttgttcctcagtgataaactcccagtggcccctccgtcccctccacccagagtcagcactatgaaagctgaggagaaaactctcttgaagatcagcttttcttctggagaccacctgggccagggatgggtttcctggtgtcactgacatactaaagattcctcttttaaacatgtagctatggagtaataaagatgtccataacgagagcaatgcccgacctgggagagggttaagtgaccttgttcaaactatttagttttgtgatttattatttttaaataaaatcaaactaaatattcaccctgtgaccttgcaggagcgcctacattaagcatagatcagagtgggctcagtgaaagctgtacccaaaaaattagaaacagcaccacatacagcatgccttctgtggttagataaaaattaaagaggtttctagtgttctactttatactggaaatactcctatagtgattatggcacaaaccttctaggctggatggggtggcacatgcctttagtcctagcacacaggaggcagaggcaagcagaatttctgaataaaagttcttatccttcttttgtgtacagtgagactcaggtacagcaatggcagctgacattctccagttgctcgcatttcatggggcagtgactagaatgcaaacctcaggaccatgaaccgaatactatttttatataaaacatgtaaataacccgaaactccatgcttaatgtatagagatcaaacgccatgcagcttaagtttcgtcatcaacagtatttatccccaggggccacataagcatagggcccatccatgtccctgtccccagtacccacataaaaacaaaaagtagctccgcatgccccctcagatgcagtccttagcgcttgggacacagaggcaggaggatcccttgagctcctcccaaccctgggtccactgacaagctagtcttgctgaacggtgagctgcagactaagtgtgagacctgaccctgacctcccgcctctacatacacttctacacacattcatgcctagattgcaaaagctctcaaaatggagccgaccaaacaggagctgagaagataagtccacagcatgtccctgctgccagtcctagccacgcagcacctatattttaggagttgttctgctgtgaaaattaccaggggatcagcttttaacaaccctttaacacagcagtcctcaagctgtgggtgacaacccctttagggttgggttgagtgaccctttcacaaggggcacataaaagacatcctgcatatcagatatttatattacgattcgttacagagcaaaattacagttatgaagtagcaatggaataagtttttgtttgggggtcagtgtaacatggactgtattgaagggccgcagcgttagggagggcgagagccactgcactagcagacatctcacagaggctgtagttccagagtgtggtttgtacctgatactttttgatgctgaagtatctgcagggctgtgtgttgctggactttcaccattccctctcatgtcaggtcgctgactattaaagggaatccactgttacggtttatcccgtcattgctgggatttcctggtggttggatgttctttgtgctcagtactacacagctgtggacttgaataaacacctcagtcacttttaagaatccttgccatgatttggctgtcatctttaggtttctacattttcactgaaagttcatctagagtgaaattcatttgcgtatcctactgtctgaaccggaagcttgtgtggtgtcagcattttaataattaggaagtgaaacaagaacaaatcagctagaacattgtcacactttatctgtaatctgctatgaaaggatggggtgtcctgctttggggttgaagggtgggatatcctttttagtgctggagtcctttcacagggggcctgggttctgcaagccctacacattttaatcttgttttaggaaagtggtatcctttgattgacgttcctcctcactaacactgtctgcaccatcattatctgccccgtagccccgtgccagccattttccattaaactgttgctgaagtattcacactgacttcctgatgtggattgtgtttggagttaagatataagtaagacacagaagatgacaaccctgcgttctgtagctgagtacatctgagctcagggtggctctgaaaaatactctcgtaactagaaagaaaactatcatcaatgttaacctgtggctgctaccaccgtattctcttcttgtcaggatcacagaatgtgatgtgcatgaaggttttgctgtagttggtcttgtttgaattattagttcaaaacttttaaaagctattattccatattcaaaggttgcataaattctcatactttcaaattaaattatttatggattactttaaggttgttcatatttttgccactgaggtttccagtttcaaactgctctatgccacaggctctgcagtggactcttctagtttttaaatgtcaattatattttgtattgggttgtacctttgatgagagatattttatgtatgctaaaccacatttgtataatttggcaaacatcatgatgacaaagtaatatacttttctggctgtttttatctttatgaagttaggtatctttattttttaatttaaatttatttaccacccaatatcaacccttcctctcctcccagtaccccctt

SEQ ID NO: 145 - DNA, 3247 bp, Mus musculus
aataaccacgttgtggccgaaggggtgaccgaggagtccttaagcagactgaaaggggctgtgagctttggatatggccttttccacctttgcatatccatggtgcccccaaacctgctcaaaatcatcaacctgctgggctttcctggagaccgcctagggcctttcttcactgacgtatgcgagcgaaagtaaggacatgaaggcccctttagctacattagccctgctgtggtaccacactgtggtccgcccattttttgctttggacggcagtgacaacaaagggggcttggatgaagctaaggcaattcttctcagaaaggaatctgcttaccccaactcttccctcttcatgtttttcaagggacggatccagcggttagagtgtcaaatcaacagtgccttgacttccttccacactgctcaggagctggctgtggaccagagggagatccagcacgtctgtctgtatgaaattggctggtgcagcatgattgaactcaacttcaaggatgcatttgattccttcgagaggctgaagaacgagtcccggtggtcccagtgctactacgcatatctgactgcagtttgtcagggagccactggtgatgtggatggggcacaacttgttcttaaagaagtccagaagctgttcaaaaggaaaaacaaccagattgaacagttttctgtgaagaaggctgagcgatttcggaagcaaaccccaaccagagcgctgtgtgtgctggcctccattgaagtgctctacttgtggaaagcccttccaaactgctccttccccaacctgcagaggatgagtcaagcttgccatgaagtggacgattcatctgtcgttggattaaagcatttgctccttggtgccatacacaaatgtctaggaaactcacaagatgctcttcagttcttccagcgagctgctagagatgagctatgtcggcagagtaactcgtacgtcccgccatatgcgtgctatgagcttggctgtctcctactggacagcgcagagactgtgggaagaggcagaactctacttcttcaggcaaaggaggatttttctggctacgactttgaaaacagattgcacgtccgcatccacgctgctctggcccccctaagggaacttgttcctcagtgataaactcccagtggcccctccgtcccctccacccagagtcagcactatgaaagctgaggagaaaactctcttgaagatcagcttttcttctggagaccacctgggccagggatgggtttcctggtgtcactgacatactaaagattcctcttttaaacatgtagctatggagtaataaagatgtccataacgagagcaatgcccgacctgggagagggttaagtgaccttgttcaaactatttagttttgtgatttattatttttaaataaaatcaaactaaatattcaccctgtgaccttgcaggagcgcctacattaagcatagatcagagtgggctcagtgaaagctgtacccaaaaaattagaaacagcaccacatacagcatgccttctgtggttagataaaaattaaagaggtttctagtgttctactttatactggaaatactcctatagtgattatggcacaaaccttctaggctggatggggtggcacatgcctttagtcctagcacacaggaggcagaggcaagcagaatttctgaataaaagttcttatccttcttttgtgtacagtgagactcaggtacagcaatggcagctgacattctccagttgctcgcatttcatggggcagtgactagaatgcaaacctcaggaccatgaaccgaatactatttttatataaaacatgtaaataacccgaaactccatgcttaatgtatagagatcaaacgccatgcagcttaagtttcgtcatcaacagtatttatccccaggggccacataagcatagggcccatccatgtccctgtccccagtacccacataaaaacaaaaagtagctccgcatgccccctcagatgcagtccttagcgcttgggacacagaggcaggaggatcccttgagctcctcccaaccctgggtccactgacaagctagtcttgctgaacggtgagctgcagactaagtgtgagacctgaccctgacctcccgcctctacatacacttctacacacattcatgcctagattgcaagctctcaaaatggagccgaccaaacaggagctgagaagataagtccacagcatgtccctgctgccagtcctagccacgcagcacctatattttaggagttgttctgctgtgaaaattaccaggggatcagcttttaacaaccctttaacacagcagtcctcaagctgtgggtgacaacccctttagggttgggttgagtgaccctttcacaaggggcacataaaagacatcctgcatatcagatatttatattacgattcgttacagagcaaaattacagttatgaagtagcaatggaataagtttttgtttgggggtcagtgtaacatggactgtattgaagggccgcagcgttagggagggcgagagccactgcactagcagacatctcacagaggctgtagttccagagtgtggtttgtacctgatactttttgatgctgaagtatctgcagggctgtgtgttgctggactttcaccattccctctcatgtcaggtcgctgactattaaagggaatccactgttacggtttatcccgtcattgctgggatttcctggtggttggatgttctttgtgctcagtactacacagctgtggacttgaataaacacctcagtcacttttaagaatccttgccatgatttggctgtcatctttaggtttctacattttcactgaaagttcatctagagtgaaattcatttgcgtatcctactgtctgaaccggaagcttgtgtggtgtcagcattttaataattaggaagtgaaacaagaacaaatcagctagaacattgtcacactttatctgtaatctgctatgaaaggatggggtgtcctgctttggggttgaagggtgggatatcctttttagtgctggagtcctttcacagggggcctgggttctgcaagccctacacattttaatcttgttttaggaaagtggtatcctttgattgacgttcctcctcactaacactgtctgcaccatcattatctgccccgtagccccgtgccagccattttccattaaactgttgctgaagtattt

SEQ ID NO: 146 - DNA, 442 bp, Mus musculus
  misc_feature 105: n = A,T,C or G
agagagagagagagagagagagagagagagagagagagagagagagagagagagccacactgtggtccgcccattttttgctttggacggcagtgatcacgtggnggggcttggatgaagctaaggcaattcttctcagaaaggaatctgcttaccccaactcttccctcttcatgtttttcaagggacggatccagcggttagagtgtcaaatcaacagtgccttgacttccttccacactgctctggagctggctgtggaccagagggagatccagcacgtctgtctgtatgaaattggctggtgcagcatgattgaactcaacttcaaggatgcatttgattccttcgagaggctgaagaacgagtcccggtggtcccagtgctactacgcatatctgactgcagtttgtcagggagccactggtgatgtggatggggc

SEQ ID NO: 147 - DNA, 5253 bp, Homo sapiens
gtctcgcgtgcgtgtgtccgagcagtcctgggcggtgggcgaaggcgcggcttggggacccgggaggggccggggcgcgggggctgcaggaagtggaggcggccgccgctcggggaccggcttggcggggtgagagacacccggaaacggattccgcttcggggcccgcgcgagttgggtgcttcggagggcgcgagaggagcgggcgggtgctgctgagtaatccccgcggcggcggccggacgcccacctcccacgccgcgccgcagccgggccgcggctcctccctccgcggtccttccctcctcttccctcccgtcttctcccctcccctcccctcccctcccggctccgcttggctccgggcaggtagagccgggctccgggcgcgcgcggggccgcagcagctgctcccgatctcgcctcggcccagcgcagggcctcgcacgcccatggccggctcggagcagcagcggccgcggcggcgggacgacggagactcggacgcggcagcggcggcggcggcgcccctgcaggacgcggagctggccctggccggcatcaacatgctgctcaacaacggcttcagggagtcggaccagcttttcaaacaatacagaaatcatagcccactaatgagttttggagccagctttgtcagttttttgaatgccatgatgacatttgaggaagaaaaaatgcagttggcatgtgatgacttaaaaaccacagaaaaactgtgtgaaagtgaagaggctggagtaattgaaacaatcaagaataaaattaagaagaacgttgatgtccgaaaatccgccccctctatggttgatcggcttcagaggcagataatcatagctgactgccaggtttacctggctgtgctttcatttgtaaaacaagaattgtcagcttatatcaaaggtgggtggatccttaggaaagcctggaagatttacaataaatgctatctggacatcaatgcccttcaggagctgtatcagaagaagctaactgaagagtccttgacttctgatgctgcaaatgataatcacattgtggctgaaggggtgtctgaggagtctctgaacagactgaaaggtgctgttagctttggatatggcctttttcacctttgcatatccatggtgcccccaaacctgctcaaaatcatcaacctgctgggttttcctggagaccgcctacaggggctttcttcactgatgtatgcaagcgaaagtaaggacatgaaggcccctttagctacattagctctgctctggtatcatactgtagtccgcccgttttttgccttggatggcagtgataacaaggcaggcctggatgaagctaaggaaattctccttaaaaaagaagctgcttatccaaattcttccctctttatgtttttcaagggacggatacaacgactagagtgtcaaatcaacagtgccttgacatctttccacactgctttggaacttgcagtagaccagagagaaattcaacatgtctgtctgtatgaaattggttggtgcagcatgatagagctcaatttcaaggatgcatttgattcctttgagaggctaaaaaatgagtccaggtggtcccagtgctattatgcctacttgactgcagtttgtcagggagccactggtgatgtggatggggcacagattgtctttaaagaagttcagaaactcttcaaaaggaaaaacaatcagattgaacagttctcggtgaaaaaggcagagcgatttcggaagcaaaccccaaccaaagcgctctgtgtgttggcgtctattgaagtgttgtacttgtggaaagctcttccaaactgttccttccccaacctgcagaggatgagtcaagcttgccatgaagtggatgactcatctgttgttggattaaagtatttgcttcttggtgccatacacaaatgtctaggaaactcagaagatgctgttcagtacttccagcgagctgttaaagatgaattgtgtcgtcagaataatttatatgttcagccgtatgcctgttatgaacttggctgtcttctattagacaaaccagagactgtaggaagaggcagagctctacttcttcaagcaaaggaggatttctctggctacgactttgaaaacagattgcatgtccgcatccatgctgctctggcctctctgagggaattggttcctcagtgacagacccggaacacccgctccgtccctccccacccagggtccgcactttaaaataaaagcagaggacaaagctcttgtgaagatgggcttttcttctgaaaaccacctgtgccagggacacattttcccagttaagctgacatattaaagatctcctcttttaaacatgtagctgaaaagtaataatgatgttgaggaggatgatgatggtaataataactaaccacctggggagagggttaagtgaccttgctcaaacgttttagttttgtgatttattatttttaaaataaaatcaaacggaacatccaacccaagatcctgtaggaacacctaccttaagcacatatctgaatgggtaacatgatgaggtacctgtaaaattattaacaatatcatgacatagcatttatatttgtgttttgaaaaaataaaagtgctttctagtgttttactttatcctcaaaatactccagtgaataacatagcacagatattcttaaccccactttgcagacagtgaaactcaggcacaaaaaggcaaattgacttatcccaattaattattcctgttatcagcagagcaatgaatagaaagcagatctcctgaccaccaactgacttttattgtaaaaataattcatgttaataggccagaattccatgttttacttattaaaagaacaaaatcttcagctgaagttatgtcaccagaaatagtcatctccagattgtctacagaatgtttcaaagcgatggacactctttttcctttgaaagccaaccaagtaagagcaaatattaatagaagataattttacaactaaaagtgtgactcttttgctaatctattagcctagtctatagattagacaaacagtatctacattttaggagtttacctttctttgtgaaaattgtcaaattaccaacttttggaaatcttttgacacattacttgaaaaggttattcgtgaatgaacatagattttggcctcaaaatatttgctggtggaacatttgctgggctacacagtgccaggatttaatcattttccccttagctcaggttatttagatattatacaaggaattcaaagttatttttttattcttcattgctaatttttgtcatttaatttacctccatgcccggtactgcaaacctgtggttttgaagaatctaaatacctcagtcacttttaagaatctctgccataatttggctcaatgtttaaggttagatttttaaagaaatttttattgagctaaaggatatcattttagggtatcgtttatttacaaattcttttggctgaaacatgatctcatattaatattttaatatttcttttcaaaataaaacagaaaagcaagtagaatgttggcaaattttatctgatttgaccttgttttgagggaatagtcataatttctttgaaagaagttatttctcactgattttggctaaacagtattcatatttcttcatctctgttactgaccacttttcagtagactgtttccaaaatgtgtattcacattgactttctccctgatgtgaattccgtgtgggttttagataatagtaagagagaagagattgctctcctatattcagtgaatgagaagggaacttttttctgaagagcaaaattggtgcccaaaaatattggacatctgttttttgtttttttttttttttttttttttttttgagacggagtctcgctctgtcacccaggctggagtgcagtggcgtgatcttggctcactgcaacctctgcctcctgggttcacaccattctcctgcctcagcctcccaagtagctgggactacaggcacccgcaaccacacccggctaattttttttgtatttttagtagagatggggtttcaccatgttagccaggattgtctccatctcctgacctcgtgatccacccgccttggcctcccaaagagctgggattactggtgtgagccaccgtgcccggcctggacatctggttttaactagatggaagggaagaacattatgaatctttaaaatacggctgttgccatttttctctcttcttaacatgcagcataggtgacaagcttttctgtcatcatcatggagcattctgaatcatgacatttttgtttgagagttcattcttgaattttcagttcaaaatattgtttgaactattattccacattcaaagattatataaggtcctgtgcttttgaatctttttcaaaacatttatttctgcctgcttaaaaaaaatacttttatttccccacagagagttcaggacttcagattagtttgtgttcagctcacttaactggatagacaattttgcgttttgcaacaccatcctgtaggttttctttactagtcaaagtgtaggtctttttaaaatttttaatctttatttttatttttattttgaaacagagtctcactctgttgcccaggctggagtgcagtggtgtgatctgtgctcactgcaacctctgtcacccgggtttaagcgattcttctgcctgagcctcccaagtagctgggattacaagttcctgccaccgtgcctggctaatttttgcagttttagtagaggcagggttccaccaccttggccaggctggtcttgaactcctgacctcatgatccacccaccttgtcctctcaaaatgcttacaggcatgaaccactgtgaccggccaggtctttttttttttaaagagtctatcctaggcttggtacagatggcgcctgtggtaaatctgtgttaacatggtggtagaccatggagaatgggtagatggagcttctagactccaaaacaacaaaaccacagtgtgagtacactgtcccattaggttgactgaagtctgagtacattttctggcctgcgtgccgtgacttatccaacctgtgaactgattgtgatctgcttggtaacttggtttggtgtaaactgctcttaaccctttgctgatgaagaaaataatcatataagtggaactatttgcatctaaaaaaaaaaaaaa

SEQ ID NO: 148 - DNA, 20 bp, Artificial Sequence
  synthetic oligonucleotide
gaagcatattgatgccagcc

SEQ ID NO: 149 - DNA, 20 bp, Artificial Sequence
  synthetic oligonucleotide
tccctgaagccgttgttgag

SEQ ID NO: 150 - DNA, 20 bp, Artificial Sequence
  synthetic oligonucleotide
ttagtggactatgatttctg

SEQ ID NO: 151 - DNA, 20 bp, Artificial Sequence
  synthetic oligonucleotide
cctcgaatgtcatcatggcg

SEQ ID NO: 152 - DNA, 20 bp, Artificial Sequence
  synthetic oligonucleotide
gtcatcgcacgccaactgca

SEQ ID NO: 153 - DNA, 20 bp, Artificial Sequence
  synthetic oligonucleotide
gtagtctttaagtcatcgca

SEQ ID NO: 154 - DNA, 20 bp, Artificial Sequence
  synthetic oligonucleotide
cgattacaccagcctcttca

SEQ ID NO: 155 - DNA, 20 bp, Artificial Sequence
  synthetic oligonucleotide
cccaccttttatgtaggccg

SEQ ID NO: 156 - DNA, 20 bp, Artificial Sequence
  synthetic oligonucleotide
ggctttcctaaggatccacc

SEQ ID NO: 157 - DNA, 20 bp, Artificial Sequence
  synthetic oligonucleotide
cgttgatgtccacatagcac

SEQ ID NO: 158 - DNA, 20 bp, Artificial Sequence
  synthetic oligonucleotide
ccaagggctcttccgtcagc

SEQ ID NO: 159 - DNA, 20 bp, Artificial Sequence
  synthetic oligonucleotide
ggtcaccccttcggccacaa

SEQ ID NO: 160 - DNA, 20 bp, Artificial Sequence
  synthetic oligonucleotide
ggccatatccaaagctcaca

SEQ ID NO: 161 - DNA, 20 bp, Artificial Sequence
  synthetic oligonucleotide
tgtcactgccgtccaaagca

SEQ ID NO: 162 - DNA, 20 bp, Artificial Sequence
  synthetic oligonucleotide
tcaatcatgctgcaccagcc

SEQ ID NO: 163 - DNA, 20 bp, Artificial Sequence
  synthetic oligonucleotide
cgtagtagcactgggaccac

SEQ ID NO: 164 - DNA, 20 bp, Artificial Sequence
  synthetic oligonucleotide
gttgtgccccatccacatca

SEQ ID NO: 165 - DNA, 20 bp, Artificial Sequence
  synthetic oligonucleotide
ttaagaacaagttgtgcccc

SEQ ID NO: 166 - DNA, 20 bp, Artificial Sequence
  synthetic oligonucleotide
tccacttcatggcaagcttg

SEQ ID NO: 167 - DNA, 20 bp, Artificial Sequence
  synthetic oligonucleotide
tgctttaatccaacgacaga

SEQ ID NO: 168 - DNA, 20 bp, Artificial Sequence
  synthetic oligonucleotide
gtacgagttactctgccgac

SEQ ID NO: 169 - DNA, 20 bp, Artificial Sequence
  synthetic oligonucleotide
tagcacgcatatggcgggac

SEQ ID NO: 170 - DNA, 20 bp, Artificial Sequence
  synthetic oligonucleotide
agttcccttagggaggccag

SEQ ID NO: 171 - DNA, 20 bp, Artificial Sequence
  synthetic oligonucleotide
ccactgggagtttatcactg

SEQ ID NO: 172 - DNA, 20 bp, Artificial Sequence
  synthetic oligonucleotide
ccaggtggctttggcttggg

SEQ ID NO: 173 - DNA, 20 bp, Artificial Sequence
  synthetic oligonucleotide
tccgaaatcgctcagcctgc

SEQ ID NO: 174 - DNA, 20 bp, Artificial Sequence
  synthetic oligonucleotide
tcagctacagaacgcagggt

SEQ ID NO: 175 - DNA, 20 bp, Artificial Sequence
  synthetic oligonucleotide
ggatttccgggcatcaacct

SEQ ID NO: 176 - DNA, 20 bp, Artificial Sequence
  synthetic oligonucleotide
caatcatgctgcaccagcct

SEQ ID NO: 177 - DNA, 20 bp, Artificial Sequence
  synthetic oligonucleotide
gatcactgccgtccaaagca
